United States Patent Application Publication US 2026/0049279 A1 - sequence listing, part 2

SEQ ID NO: 29828 - DNA, 24 bp, synthetic construct
  source 1..24: mol_type = other DNA
gccacaagcataggttaccctaat

SEQ ID NO: 29829 - DNA, 15 bp, synthetic construct
  source 1..15: mol_type = other DNA
ctgggacataatgct

SEQ ID NO: 29830 - DNA, 18 bp, synthetic construct
  source 1..18: mol_type = other DNA
gatcgtaatgttgactac

SEQ ID NO: 29831 - DNA, 15 bp, synthetic construct
  source 1..15: mol_type = other DNA
ctgggacataatgct

SEQ ID NO: 29832 - DNA, 18 bp, synthetic construct
  source 1..18: mol_type = other DNA
gacagcacttttgactac

SEQ ID NO: 29833 - DNA, 15 bp, synthetic construct
  source 1..15: mol_type = other DNA
tctggacatgatacc

SEQ ID NO: 29834 - DNA, 21 bp, synthetic construct
  source 1..21: mol_type = other DNA
aacattgctacaagcgagtac

SEQ ID NO: 29835 - DNA, 15 bp, synthetic construct
  source 1..15: mol_type = other DNA
ctgggccacgatact

SEQ ID NO: 29836 - DNA, 24 bp, synthetic construct
  source 1..24: mol_type = other DNA
gccacaagcatagcttaccctaat

SEQ ID NO: 29837 - DNA, 15 bp, synthetic construct
  source 1..15: mol_type = other DNA
ctgggccacgatact

SEQ ID NO: 29838 - DNA, 21 bp, synthetic construct
  source 1..21: mol_type = other DNA
acccgggacagttcttacttc

SEQ ID NO: 29839 - DNA, 15 bp, synthetic construct
  source 1..15: mol_type = other DNA
aataaccacaacaac

SEQ ID NO: 29840 - DNA, 21 bp, synthetic construct
  source 1..21: mol_type = other DNA
aacattgctacaagcgagtac

SEQ ID NO: 29841 - DNA, 15 bp, synthetic construct
  source 1..15: mol_type = other DNA
aataaccacaacaac

SEQ ID NO: 29842 - DNA, 21 bp, synthetic construct
  source 1..21: mol_type = other DNA
acccaggacagttcttacttc

SEQ ID NO: 29843 - DNA, 15 bp, synthetic construct
  source 1..15: mol_type = other DNA
aataaccatgactat

SEQ ID NO: 29844 - DNA, 18 bp, synthetic construct
  source 1..18: mol_type = other DNA
gaccctaacagttattac

SEQ ID NO: 29845 - DNA, 15 bp, synthetic construct
  source 1..15: mol_type = other DNA
aataaccatgactat

SEQ ID NO: 29846 - DNA, 24 bp, synthetic construct
  source 1..24: mol_type = other DNA
accacaagcatagcttaccctaat

SEQ ID NO: 29847 - DNA, 18 bp, synthetic construct
  source 1..18: mol_type = other DNA
gggaaatcaagccctaac

SEQ ID NO: 29848 - DNA, 18 bp, synthetic construct
  source 1..18: mol_type = other DNA
tactttgggacaccttat

SEQ ID NO: 29849 - protein, 17 aa, synthetic construct
MYWYKQDSKKLLKIMFS

SEQ ID NO: 29850 - protein, 17 aa, synthetic construct
LFWYVRYPGEGLQLLLK

SEQ ID NO: 29851 - protein, 17 aa, synthetic construct
MYWYRQDTGHGLRLIHY

SEQ ID NO: 29852 - protein, 17 aa, synthetic construct
FWWYRQHSGKAPKALMS

SEQ ID NO: 29853 - protein, 17 aa, synthetic construct
MYWYKQDSKKLLKIMFS

SEQ ID NO: 29854 - protein, 17 aa, synthetic construct
LFWYVRYPGEGLQLLLK

SEQ ID NO: 29855 - protein, 17 aa, synthetic construct
MYWYKQSAEKPPELMFL

SEQ ID NO: 29856 - protein, 17 aa, synthetic construct
LFWYVRYPGEGLQLLLK

SEQ ID NO: 29857 - protein, 17 aa, synthetic construct
MYWYKQSAEKPPELMFL

SEQ ID NO: 29858 - protein, 17 aa, synthetic construct
FWWYRQHSGKSPKMLMS

SEQ ID NO: 29859 - protein, 17 aa, synthetic construct
MYWYKQSAEKPPELMFL

SEQ ID NO: 29860 - protein, 17 aa, synthetic construct
FPWYWQFPRESPALLIA

SEQ ID NO: 29861 - protein, 17 aa, synthetic construct
LYWYQQPRDQGPQLLVY

SEQ ID NO: 29862 - protein, 17 aa, synthetic construct
IYWYRQVPHQGPQFIIQ

SEQ ID NO: 29863 - protein, 17 aa, synthetic construct
MYWYKQDSKKLLKIMFS

SEQ ID NO: 29864 - protein, 17 aa, synthetic construct
LFWYVRYPGEGLQLLLK

SEQ ID NO: 29865 - protein, 17 aa, synthetic construct
MYWYKQDSKKLLKIMFS

SEQ ID NO: 29866 - protein, 17 aa, synthetic construct
LFWYKQTASGEIVFLIR

SEQ ID NO: 29867 - protein, 17 aa, synthetic construct
MYWYRQDTGHGLRLIHY

SEQ ID NO: 29868 - protein, 17 aa, synthetic construct
IYWYRQVPHQGPQFIIQ

SEQ ID NO: 29869 - protein, 17 aa, synthetic construct
MYWYRQDTGHGLRLIHY

SEQ ID NO: 29870 - protein, 17 aa, synthetic construct
LFWYKQTASGEIVFLIR

SEQ ID NO: 29871 - protein, 17 aa, synthetic construct
MYWYRQDTGHGLRLIHY

SEQ ID NO: 29872 - protein, 17 aa, synthetic construct
FFWYKQEPGASLQLLMK

SEQ ID NO: 29873 - protein, 17 aa, synthetic construct
MYWYRQDTGHGLRLIHY

SEQ ID NO: 29874 - protein, 17 aa, synthetic construct
LFWYVRYPGEGLQLLLK

SEQ ID NO: 29875 - protein, 17 aa, synthetic construct
LYWYWQATGGTLQQLFY

SEQ ID NO: 29876 - protein, 17 aa, synthetic construct
LFWYVQYPRQGLQLLLK

SEQ ID NO: 29877 - DNA, 51 bp, synthetic construct; identical to SEQ ID NO: 7519
  source 1..51: mol_type = other DNA

SEQ ID NO: 29878 - DNA, 51 bp, synthetic construct; identical to SEQ ID NO: 7480
  source 1..51: mol_type = other DNA

SEQ ID NO: 29879 - DNA, 51 bp, synthetic construct; identical to SEQ ID NO: 7423
  source 1..51: mol_type = other DNA

SEQ ID NO: 29880 - DNA, 51 bp, synthetic construct; identical to SEQ ID NO: 7496
  source 1..51: mol_type = other DNA

SEQ ID NO: 29881 - DNA, 51 bp, synthetic construct; identical to SEQ ID NO: 7519
  source 1..51: mol_type = other DNA

SEQ ID NO: 29882 - DNA, 51 bp, synthetic construct; identical to SEQ ID NO: 7480
  source 1..51: mol_type = other DNA

SEQ ID NO: 29883 - DNA, 51 bp, synthetic construct; identical to SEQ ID NO: 7515
  source 1..51: mol_type = other DNA

SEQ ID NO: 29884 - DNA, 51 bp, synthetic construct; identical to SEQ ID NO: 7480
  source 1..51: mol_type = other DNA

SEQ ID NO: 29885 - DNA, 51 bp, synthetic construct; identical to SEQ ID NO: 7515
  source 1..51: mol_type = other DNA

SEQ ID NO: 29886 - DNA, 51 bp, synthetic construct; identical to SEQ ID NO: 7448
  source 1..51: mol_type = other DNA

SEQ ID NO: 29887 - DNA, 51 bp, synthetic construct; identical to SEQ ID NO: 7515
  source 1..51: mol_type = other DNA

SEQ ID NO: 29888 - DNA, 51 bp, synthetic construct; identical to SEQ ID NO: 7702
  source 1..51: mol_type = other DNA

SEQ ID NO: 29889 - DNA, 51 bp, synthetic construct; identical to SEQ ID NO: 7421
  source 1..51: mol_type = other DNA

SEQ ID NO: 29890 - DNA, 51 bp, synthetic construct; identical to SEQ ID NO: 7526
  source 1..51: mol_type = other DNA

SEQ ID NO: 29891 - DNA, 51 bp, synthetic construct; identical to SEQ ID NO: 7519
  source 1..51: mol_type = other DNA

SEQ ID NO: 29892 - DNA, 51 bp, synthetic construct; identical to SEQ ID NO: 7480
  source 1..51: mol_type = other DNA

SEQ ID NO: 29893 - DNA, 51 bp, synthetic construct; identical to SEQ ID NO: 7519
  source 1..51: mol_type = other DNA

SEQ ID NO: 29894 - DNA, 51 bp, synthetic construct; identical to SEQ ID NO: 7426
  source 1..51: mol_type = other DNA

SEQ ID NO: 29895 - DNA, 51 bp, synthetic construct; identical to SEQ ID NO: 7423
  source 1..51: mol_type = other DNA

SEQ ID NO: 29896 - DNA, 51 bp, synthetic construct; identical to SEQ ID NO: 7526
  source 1..51: mol_type = other DNA

SEQ ID NO: 29897 - DNA, 51 bp, synthetic construct; identical to SEQ ID NO: 7423
  source 1..51: mol_type = other DNA

SEQ ID NO: 29898 - DNA, 51 bp, synthetic construct; identical to SEQ ID NO: 7426
  source 1..51: mol_type = other DNA

SEQ ID NO: 29899 - DNA, 51 bp, synthetic construct; identical to SEQ ID NO: 7427
  source 1..51: mol_type = other DNA

SEQ ID NO: 29900 - DNA, 51 bp, synthetic construct; identical to SEQ ID NO: 7462
  source 1..51: mol_type = other DNA

SEQ ID NO: 29901 - DNA, 51 bp, synthetic construct; identical to SEQ ID NO: 7427
  source 1..51: mol_type = other DNA

SEQ ID NO: 29902 - DNA, 51 bp, synthetic construct; identical to SEQ ID NO: 7480
  source 1..51: mol_type = other DNA

SEQ ID NO: 29903 - DNA, 51 bp, synthetic construct; identical to SEQ ID NO: 7455
  source 1..51: mol_type = other DNA

SEQ ID NO: 29904 - DNA, 51 bp, synthetic construct; identical to SEQ ID NO: 7432
  source 1..51: mol_type = other DNA

SEQ ID NO: 29905 - protein, 6 aa, synthetic construct
YNNKQL

SEQ ID NO: 29906 - protein, 7 aa, synthetic construct
VITAGQK

SEQ ID NO: 29907 - protein, 6 aa, synthetic construct
SYGAGS

SEQ ID NO: 29908 - protein, 6 aa, synthetic construct
IFSNGE

SEQ ID NO: 29909 - protein, 6 aa, synthetic construct
YNNKQL

SEQ ID NO: 29910 - protein, 7 aa, synthetic construct
VITAGQK

SEQ ID NO: 29911 - protein, 6 aa, synthetic construct
YNLKQL

SEQ ID NO: 29912 - protein, 7 aa, synthetic construct
VITAGQK

SEQ ID NO: 29913 - protein, 6 aa, synthetic construct
YNLKQL

SEQ ID NO: 29914 - protein, 6 aa, synthetic construct
IFSNGE

SEQ ID NO: 29915 - protein, 6 aa, synthetic construct
YNLKQL

SEQ ID NO: 29916 - protein, 7 aa, synthetic construct
IRPVSNK

SEQ ID NO: 29917 - protein, 6 aa, synthetic construct
FRDEAV

SEQ ID NO: 29918 - protein, 7 aa, synthetic construct
GYKDYVV

SEQ ID NO: 29919 - protein, 6 aa, synthetic construct
YNNKQL

SEQ ID NO: 29920 - protein, 7 aa, synthetic construct
VITAGQK

SEQ ID NO: 29921 - protein, 6 aa, synthetic construct
YNNKQL

SEQ ID NO: 29922 - protein, 8 aa, synthetic construct
QDSYKKEN

SEQ ID NO: 29923 - protein, 6 aa, synthetic construct
SYGAGS

SEQ ID NO: 29924 - protein, 7 aa, synthetic construct
GYKDYVV

SEQ ID NO: 29925 - protein, 6 aa, synthetic construct
SYGAGS

SEQ ID NO: 29926 - protein, 8 aa, synthetic construct
QDSYKKEN

SEQ ID NO: 29927 - protein, 6 aa, synthetic construct
SYVADS

SEQ ID NO: 29928 - protein, 7 aa, synthetic construct
VFSSTEI

SEQ ID NO: 29929 - protein, 6 aa, synthetic construct
SYVADS

SEQ ID NO: 29930 - protein, 7 aa, synthetic construct
VITAGQK

SEQ ID NO: 29931 - protein, 5 aa, synthetic construct
SITVG

SEQ ID NO: 29932 - protein, 8 aa, synthetic construct
YYPGDPVV

SEQ ID NO: 29933 - DNA, 18 bp, synthetic construct
  source 1..18: mol_type = other DNA
tacaataataagcaactc

SEQ ID NO: 29934 - DNA, 21 bp, synthetic construct
  source 1..21: mol_type = other DNA
gtcattacggctggccagaag

SEQ ID NO: 29935 - DNA, 18 bp, synthetic construct
  source 1..18: mol_type = other DNA
tcatatggtgctggcagc

SEQ ID NO: 29936 - DNA, 18 bp, synthetic construct
  source 1..18: mol_type = other DNA
atcttctccaatggtgaa

SEQ ID NO: 29937 - DNA, 18 bp, synthetic construct
  source 1..18: mol_type = other DNA
tacaataataagcaactc

SEQ ID NO: 29938 - DNA, 21 bp, synthetic construct
  source 1..21: mol_type = other DNA
gtcattacggctggccagaag

SEQ ID NO: 29939 - DNA, 18 bp, synthetic construct
  source 1..18: mol_type = other DNA
tacaatcttaaacagttg

SEQ ID NO: 29940 - DNA, 21 bp, synthetic construct
  source 1..21: mol_type = other DNA
gtcattacggctggccagaag

SEQ ID NO: 29941 - DNA, 18 bp, synthetic construct
  source 1..18: mol_type = other DNA
tacaatcttaaacagttg

SEQ ID NO: 29942 - DNA, 18 bp, synthetic construct
  source 1..18: mol_type = other DNA
atcttctccaatggtgaa

SEQ ID NO: 29943 - DNA, 18 bp, synthetic construct
  source 1..18: mol_type = other DNA
tacaatcttaaacagttg

SEQ ID NO: 29944 - DNA, 21 bp, synthetic construct
  source 1..21: mol_type = other DNA
atacgtccagtgtccaataaa

SEQ ID NO: 29945 - DNA, 18 bp, synthetic construct
  source 1..18: mol_type = other DNA
tttcgggatgaggctgtt

SEQ ID NO: 29946 - DNA, 21 bp, synthetic construct
  source 1..21: mol_type = other DNA
ggatataaggactatgtggta

SEQ ID NO: 29947 - DNA, 18 bp, synthetic construct
  source 1..18: mol_type = other DNA
tacaataataagcaactc

SEQ ID NO: 29948 - DNA, 21 bp, synthetic construct
  source 1..21: mol_type = other DNA
gtcattacggctggccagaag

SEQ ID NO: 29949 - DNA, 18 bp, synthetic construct
  source 1..18: mol_type = other DNA
tacaataataagcaactc

SEQ ID NO: 29950 - DNA, 24 bp, synthetic construct
  source 1..24: mol_type = other DNA
caggactcttacaaaaaggaaaat

SEQ ID NO: 29951 - DNA, 18 bp, synthetic construct
  source 1..18: mol_type = other DNA
tcatatggtgctggcagc

SEQ ID NO: 29952 - DNA, 21 bp, synthetic construct
  source 1..21: mol_type = other DNA
ggatataaggactatgtggta

SEQ ID NO: 29953 - DNA, 18 bp, synthetic construct
  source 1..18: mol_type = other DNA
tcatatggtgctggcagc

SEQ ID NO: 29954 - DNA, 24 bp, synthetic construct
  source 1..24: mol_type = other DNA
caggactcttacaaaaaggaaaat

SEQ ID NO: 29955 - DNA, 18 bp, synthetic construct
  source 1..18: mol_type = other DNA
tcatatgtcgctgacagc

SEQ ID NO: 29956 - DNA, 21 bp, synthetic construct
  source 1..21: mol_type = other DNA
gttttctcaagtacggaaata

SEQ ID NO: 29957 - DNA, 18 bp, synthetic construct
  source 1..18: mol_type = other DNA
tcatatgtcgctgacagc

SEQ ID NO: 29958 - DNA, 21 bp, synthetic construct
  source 1..21: mol_type = other DNA
gtcattacggctggccagaag

SEQ ID NO: 29959 - DNA, 15 bp, synthetic construct
  source 1..15: mol_type = other DNA
tctattactgttggc

SEQ ID NO: 29960 - DNA, 24 bp, synthetic construct
  source 1..24: mol_type = other DNA
tactatccaggagacccagtggtt

SEQ ID NO: 29961 - protein, 36 aa, synthetic construct; identical to SEQ ID NO: 11971

SEQ ID NO: 29962 - protein, 33 aa, synthetic construct; identical to SEQ ID NO: 11932

SEQ ID NO: 29963 - protein, 36 aa, synthetic construct; identical to SEQ ID NO: 11875

SEQ ID NO: 29964 - protein, 33 aa, synthetic construct; identical to SEQ ID NO: 11948

SEQ ID NO: 29965 - protein, 36 aa, synthetic construct; identical to SEQ ID NO: 11971

SEQ ID NO: 29966 - protein, 33 aa, synthetic construct; identical to SEQ ID NO: 11932

SEQ ID NO: 29967 - protein, 36 aa, synthetic construct; identical to SEQ ID NO: 11967

SEQ ID NO: 29968 - protein, 33 aa, synthetic construct; identical to SEQ ID NO: 12094

SEQ ID NO: 29969 - protein, 36 aa, synthetic construct; identical to SEQ ID NO: 11967

SEQ ID NO: 29970 - protein, 33 aa, synthetic construct; identical to SEQ ID NO: 11900

SEQ ID NO: 29971 - protein, 36 aa, synthetic construct; identical to SEQ ID NO: 11967

SEQ ID NO: 29972 - protein, 33 aa, synthetic construct; identical to SEQ ID NO: 11940

SEQ ID NO: 29973 - protein, 37 aa, synthetic construct; identical to SEQ ID NO: 11873

SEQ ID NO: 29974 - protein, 31 aa, synthetic construct; identical to SEQ ID NO: 11978

SEQ ID NO: 29975 - protein, 36 aa, synthetic construct; identical to SEQ ID NO: 11971

SEQ ID NO: 29976 - protein, 33 aa, synthetic construct; identical to SEQ ID NO: 11932

SEQ ID NO: 29977 - protein, 36 aa, synthetic construct; identical to SEQ ID NO: 11971

SEQ ID NO: 29978 - protein, 33 aa, synthetic construct; identical to SEQ ID NO: 11916

SEQ ID NO: 29979 - protein, 36 aa, synthetic construct; identical to SEQ ID NO: 11875

SEQ ID NO: 29980 - protein, 31 aa, synthetic construct; identical to SEQ ID NO: 11978

SEQ ID NO: 29981 - protein, 36 aa, synthetic construct; identical to SEQ ID NO: 11875

SEQ ID NO: 29982 - protein, 33 aa, synthetic construct; identical to SEQ ID NO: 11878

SEQ ID NO: 29983 - protein, 36 aa, synthetic construct; identical to SEQ ID NO: 11879

SEQ ID NO: 29984 - protein, 33 aa, synthetic construct; identical to SEQ ID NO: 11914

SEQ ID NO: 29985 - protein, 36 aa, synthetic construct; identical to SEQ ID NO: 11879

SEQ ID NO: 29986 - protein, 33 aa, synthetic construct; identical to SEQ ID NO: 11932

SEQ ID NO: 29987 - protein, 36 aa, synthetic construct; identical to SEQ ID NO: 11907

SEQ ID NO: 29988 - protein, 33 aa, synthetic construct; identical to SEQ ID NO: 11924

SEQ ID NO: 29989 - DNA, 108 bp, synthetic construct; identical to SEQ ID NO: 13455
  source 1..108: mol_type = other DNA

SEQ ID NO: 29990 - DNA, 99 bp, synthetic construct; identical to SEQ ID NO: 13416
  source 1..99: mol_type = other DNA

SEQ ID NO: 29991 - DNA, 108 bp, synthetic construct; identical to SEQ ID NO: 13359
  source 1..108: mol_type = other DNA

SEQ ID NO: 29992 - DNA, 99 bp, synthetic construct; identical to SEQ ID NO: 13432
  source 1..99: mol_type = other DNA

SEQ ID NO: 29993 - DNA, 108 bp, synthetic construct; identical to SEQ ID NO: 13455
  source 1..108: mol_type = other DNA

SEQ ID NO: 29994 - DNA, 99 bp, synthetic construct; identical to SEQ ID NO: 13416
  source 1..99: mol_type = other DNA

SEQ ID NO: 29995 - DNA, 108 bp, synthetic construct; identical to SEQ ID NO: 13451
  source 1..108: mol_type = other DNA

SEQ ID NO: 29996 - DNA, 99 bp, synthetic construct; identical to SEQ ID NO: 13578
  source 1..99: mol_type = other DNA

SEQ ID NO: 29997 - DNA, 108 bp, synthetic construct; identical to SEQ ID NO: 13451
  source 1..108: mol_type = other DNA

SEQ ID NO: 29998 - DNA, 99 bp, synthetic construct; identical to SEQ ID NO: 13384
  source 1..99: mol_type = other DNA

SEQ ID NO: 29999 - DNA, 108 bp, synthetic construct; identical to SEQ ID NO: 13451
  source 1..108: mol_type = other DNA

SEQ ID NO: 30000 - DNA, 99 bp, synthetic construct; identical to SEQ ID NO: 13596
  source 1..99: mol_type = other DNA

SEQ ID NO: 30001 - DNA, 111 bp, synthetic construct; identical to SEQ ID NO: 13357
  source 1..111: mol_type = other DNA

SEQ ID NO: 30002 - DNA, 93 bp, synthetic construct; identical to SEQ ID NO: 13462
  source 1..93: mol_type = other DNA

SEQ ID NO: 30003 - DNA, 108 bp, synthetic construct; identical to SEQ ID NO: 13455
  source 1..108: mol_type = other DNA

SEQ ID NO: 30004 - DNA, 99 bp, synthetic construct; identical to SEQ ID NO: 13416
  source 1..99: mol_type = other DNA

SEQ ID NO: 30005 - DNA, 108 bp, synthetic construct; identical to SEQ ID NO: 13455
  source 1..108: mol_type = other DNA

SEQ ID NO: 30006 - DNA, 99 bp, synthetic construct; identical to SEQ ID NO: 13400
  source 1..99: mol_type = other DNA

SEQ ID NO: 30007 - DNA, 108 bp, synthetic construct; identical to SEQ ID NO: 13359
  source 1..108: mol_type = other DNA

SEQ ID NO: 30008 - DNA, 93 bp, synthetic construct; identical to SEQ ID NO: 13462
  source 1..93: mol_type = other DNA

SEQ ID NO: 30009 - DNA, 108 bp, synthetic construct; identical to SEQ ID NO: 13359
  source 1..108: mol_type = other DNA

SEQ ID NO: 30010 - DNA, 99 bp, synthetic construct; identical to SEQ ID NO: 13444
  source 1..99: mol_type = other DNA

SEQ ID NO: 30011 - DNA, 108 bp, synthetic construct; identical to SEQ ID NO: 13363
  source 1..108: mol_type = other DNA

SEQ ID NO: 30012 - DNA, 99 bp, synthetic construct; identical to SEQ ID NO: 13398
  source 1..99: mol_type = other DNA

SEQ ID NO: 30013 - DNA, 108 bp, synthetic construct; identical to SEQ ID NO: 13363
  source 1..108: mol_type = other DNA

SEQ ID NO: 30014 - DNA, 99 bp, synthetic construct; identical to SEQ ID NO: 13416
  source 1..99: mol_type = other DNA

SEQ ID NO: 30015 - DNA, 108 bp, synthetic construct; identical to SEQ ID NO: 13391
  source 1..108: mol_type = other DNA

SEQ ID NO: 30016 - DNA, 99 bp, synthetic construct; identical to SEQ ID NO: 13408
  source 1..99: mol_type = other DNA

SEQ ID NO: 30017 - protein, 15 aa, synthetic construct
CASRHIWGGAETLYF

SEQ ID NO: 30018 - protein, 14 aa, synthetic construct
CALALNTNTGKLTF

SEQ ID NO: 30019 - protein, 14 aa, synthetic construct
CASGDARVPYEQYF

SEQ ID NO: 30020 - protein, 12 aa, synthetic construct
CAVGTGYQNFYF

SEQ ID NO: 30021 - protein, 14 aa, synthetic construct
CASSFRDNNERLFF

SEQ ID NO: 30022 - protein, 14 aa, synthetic construct
CALALNYNQGKLIF

SEQ ID NO: 30023 - protein, 15 aa, synthetic construct
CASSQDIAGGYEQYF

SEQ ID NO: 30024 - protein, 13 aa, synthetic construct
CALSYTNAYKVIF

SEQ ID NO: 30025 - protein, 15 aa, synthetic construct
CASSQAGLGYAEQFF

SEQ ID NO: 30026 - protein, 11 aa, synthetic construct
CAARSNNAPRF

SEQ ID NO: 30027 - protein, 15 aa, synthetic construct
CASSQGTGDNQAPLF

SEQ ID NO: 30028 - protein, 14 aa, synthetic construct
CAASYDSGYNKLTF

SEQ ID NO: 30029 - protein, 12 aa, synthetic construct
CASQQGSYEQYF

SEQ ID NO: 30030 - protein, 13 aa, synthetic construct
CIVTDYYAQGLTF

SEQ ID NO: 30031 - protein, 15 aa, synthetic construct
CASRHIWGGAETLYF

SEQ ID NO: 30032 - protein, 14 aa, synthetic construct
CALALNTNTRKLTI

SEQ ID NO: 30033 - protein, 13 aa, synthetic construct
CASSSGNYAEQFF

SEQ ID NO: 30034 - protein, 15 aa, synthetic construct
CAMREGSTGYQNFYF

SEQ ID NO: 30035 - protein, 14 aa, synthetic construct
CASGERTGGGEQYF

SEQ ID NO: 30036 - protein, 15 aa, synthetic construct
CIVTERGSALGRLHF

SEQ ID NO: 30037 - protein, 14 aa, synthetic construct
CASGDGQSSYEQYF

SEQ ID NO: 30038 - protein, 15 aa, synthetic construct
CAMREPRTGGYKVVF

SEQ ID NO: 30039 - protein, 14 aa, synthetic construct
CASRPTGGQNTLYF

SEQ ID NO: 30040 - protein, 15 aa, synthetic construct
CAVSAETGNTRKLIF

SEQ ID NO: 30041 - protein, 11 aa, synthetic construct
CASARNYEQYF

SEQ ID NO: 30042 - protein, 14 aa, synthetic construct
CALGDEGSNAKLTF

SEQ ID NO: 30043 - protein, 12 aa, synthetic construct
CAWSLEGVEQYF

SEQ ID NO: 30044 - protein, 14 aa, synthetic construct
CAVILSSGSWQLIF

SEQ ID NO: 30045 - DNA, 45 bp, synthetic construct
  source 1..45: mol_type = other DNA
tgtgccagcagacacatctgggggggtgcagaaacgctgtatttt

SEQ ID NO: 30046 - DNA, 42 bp, synthetic construct
  source 1..42: mol_type = other DNA
tgtgctctggcccttaacaccaatacaggcaaattaaccttt

SEQ ID NO: 30047 - DNA, 42 bp, synthetic construct
  source 1..42: mol_type = other DNA
tgtgccagcggtgatgcccgggtcccctatgaacagtacttc

SEQ ID NO: 30048 - DNA, 36 bp, synthetic construct
  source 1..36: mol_type = other DNA
tgtgccgtgggcacgggttaccagaacttctatttt

SEQ ID NO: 30049 - DNA, 42 bp, synthetic construct
  source 1..42: mol_type = other DNA
tgtgccagcagcttccgggacaacaacgaaagattatttttc

SEQ ID NO: 30050 - DNA, 42 bp, synthetic construct
  source 1..42: mol_type = other DNA
tgtgctctggccttgaattataaccaggggaagcttatcttt

SEQ ID NO: 30051 - DNA, 45 bp, synthetic construct
  source 1..45: mol_type = other DNA
tgtgccagcagccaagatatcgctggggggtatgaacagtacttc

SEQ ID NO: 30052 - DNA, 39 bp, synthetic construct
  source 1..39: mol_type = other DNA
tgcgctctgagttacacaaatgcttacaaagtcatcttt

SEQ ID NO: 30053 - DNA, 45 bp, synthetic construct
  source 1..45: mol_type = other DNA
tgtgccagcagccaagcgggactggggtatgctgagcagttcttc

SEQ ID NO: 30054 - DNA, 33 bp, synthetic construct
  source 1..33: mol_type = other DNA
tgtgcagcaagaagcaacaatgccccacgattt

SEQ ID NO: 30055 - DNA, 45 bp, synthetic construct
  source 1..45: mol_type = other DNA
tgtgccagcagccaagggacaggggacaaccaggctccgcttttt

SEQ ID NO: 30056 - DNA, 42 bp, synthetic construct
  source 1..42: mol_type = other DNA
tgtgcagcaagctatgactcgggatacaacaaactcactttt

SEQ ID NO: 30057 - DNA, 36 bp, synthetic construct
  source 1..36: mol_type = other DNA
tgtgccagccaacaggggtcctatgaacagtacttc

SEQ ID NO: 30058 - DNA, 39 bp, synthetic construct
  source 1..39: mol_type = other DNA
tgcattgtgactgactactatgcccagggattaaccttc

SEQ ID NO: 30059 - DNA, 45 bp, synthetic construct; identical to SEQ ID NO: 30045
  source 1..45: mol_type = other DNA

SEQ ID NO: 30060 - DNA, 42 bp, synthetic construct
  source 1..42: mol_type = other DNA
tgtgctctggcccttaacaccaatacacgcaaattaaccatt

SEQ ID NO: 30061 - DNA, 39 bp, synthetic construct
  source 1..39: mol_type = other DNA
tgtgccagcagctccgggaactatgctgagcagttcttc

SEQ ID NO: 30062 - DNA, 45 bp, synthetic construct
  source 1..45: mol_type = other DNA
tgtgctatgagagagggctccacgggttaccagaacttctatttt

SEQ ID NO: 30063 - DNA, 42 bp, synthetic construct
  source 1..42: mol_type = other DNA
tgtgccagcggtgagcggacagggggtggggaacagtacttc

SEQ ID NO: 30064 - DNA, 45 bp, synthetic construct
  source 1..45: mol_type = other DNA
tgcattgtgactgagagaggttcagccttagggaggctgcatttt

SEQ ID NO: 30065 - DNA, 42 bp, synthetic construct
  source 1..42: mol_type = other DNA
tgtgccagcggtgatggacaaagctcctatgaacagtacttc

SEQ ID NO: 30066 - DNA, 45 bp, synthetic construct
  source 1..45: mol_type = other DNA
tgtgctatgagagagccccggactggaggctataaagtggtcttt

SEQ ID NO: 30067 - DNA, 42 bp, synthetic construct
  source 1..42: mol_type = other DNA
tgtgccagcagacccactgggggccaaaacaccttgtacttt

SEQ ID NO: 30068 - DNA, 45 bp, synthetic construct
  source 1..45: mol_type = other DNA
tgcgcagtcagtgcagaaacaggcaatactagaaaactcatcttt

SEQ ID NO: 30069 - DNA, 33 bp, synthetic construct
  source 1..33: mol_type = other DNA
tgtgccagcgcccggaattatgaacagtacttc

SEQ ID NO: 30070 - DNA, 42 bp, synthetic construct
  source 1..42: mol_type = other DNA
tgtgctctgggtgatgagggaagcaatgcaaagctaaccttc

SEQ ID NO: 30071 - DNA, 36 bp, synthetic construct
  source 1..36: mol_type = other DNA
tgtgcctggagtctagagggggttgaacagtacttc

SEQ ID NO: 30072 - DNA, 42 bp, synthetic construct
  source 1..42: mol_type = other DNA
tgtgctgtgattttatcttctggcagctggcaactcatcttt

SEQ ID NO: 30073 - protein, 9 aa, synthetic construct
GSGTRLTVL

SEQ ID NO: 30074 - protein, 10 aa, synthetic construct
GDGTVLTVKP

SEQ ID NO: 30075 - protein, 9 aa, synthetic construct
GPGTRLTVL

SEQ ID NO: 30076 - protein, 10 aa, synthetic construct
GKGTSLTVIP

SEQ ID NO: 30077 - protein, 9 aa, synthetic construct
GHGTKLSVL

SEQ ID NO: 30078 - protein, 10 aa, synthetic construct
GQGTKLSIKP

SEQ ID NO: 30079 - protein, 9 aa, synthetic construct
GPGTRLTVL

SEQ ID NO: 30080 - protein, 10 aa, synthetic construct
GKGTHLHVLP

SEQ ID NO: 30081 - protein, 9 aa, synthetic construct
GPGTRLTVL

SEQ ID NO: 30082 - protein, 10 aa, synthetic construct
GAGTKLSVKP

SEQ ID NO: 30083 - protein, 9 aa, synthetic construct
GEGTRLSVL

SEQ ID NO: 30084 - protein, 10 aa, synthetic construct
GKGTVLLVSP

SEQ ID NO: 30085 - protein, 9 aa, synthetic construct
GPGTRLTVL

SEQ ID NO: 30086 - protein, 10 aa, synthetic construct
GLGTRVSVFP

SEQ ID NO: 30087 - protein, 9 aa, synthetic construct
GSGTRLTVL

SEQ ID NO: 30088 - protein, 10 aa, synthetic construct
WDGTVLTVKP

SEQ ID NO: 30089 - protein, 9 aa, synthetic construct
GPGTRLTVL

SEQ ID NO: 30090 - protein, 10 aa, synthetic construct
GKGTSLTVIP

SEQ ID NO: 30091 - protein, 9 aa, synthetic construct
GPGTRLTVL

SEQ ID NO: 30092 - protein, 10 aa, synthetic construct
GAGTQLIVIP

SEQ ID NO: 30093 - protein, 9 aa, synthetic construct
GPGTRLTVL

SEQ ID NO: 30094 - protein, 10 aa, synthetic construct
GSGTRLLVSP

SEQ ID NO: 30095 - protein, 9 aa, synthetic construct
GAGTRLSVL

SEQ ID NO: 30096 - protein, 10 aa, synthetic construct
GLGTTLQVQP

SEQ ID NO: 30097 - protein, 9 aa, synthetic construct
GPGTRLTVL

SEQ ID NO: 30098 - protein, 10 aa, synthetic construct
GKGTKLSVKS

SEQ ID NO: 30099 - protein, 9 aa, synthetic construct
GPGTRLTVL

SEQ ID NO: 30100 - protein, 10 aa, synthetic construct
GSGTQLTVMP

SEQ ID NO: 30101 - DNA, 28 bp, synthetic construct
  source 1..28: mol_type = other DNA
ggctcaggaaccagactgactgttctcg

SEQ ID NO: 30102 - DNA, 31 bp, synthetic construct; identical to SEQ ID NO: 18000
  source 1..31: mol_type = other DNA

SEQ ID NO: 30103 - DNA, 28 bp, synthetic construct
  source 1..28: mol_type = other DNA
ggtcccggcaccaggctcacggttttag

SEQ ID NO: 30104 - DNA, 31 bp, synthetic construct; identical to SEQ ID NO: 17850
  source 1..31: mol_type = other DNA

SEQ ID NO: 30105 - DNA, 28 bp, synthetic construct
  source 1..28: mol_type = other DNA
ggtcatggaaccaagctgtctgtcctgg

SEQ ID NO: 30106 - DNA, 31 bp, synthetic construct; identical to SEQ ID NO: 17816
  source 1..31: mol_type = other DNA

SEQ ID NO: 30107 - DNA, 28 bp, synthetic construct
  source 1..28: mol_type = other DNA
ggtcccggcaccaggctcacggttttag

SEQ ID NO: 30108 - DNA, 31 bp, synthetic construct; identical to SEQ ID NO: 17814
  source 1..31: mol_type = other DNA

SEQ ID NO: 30109 - DNA, 28 bp, synthetic construct
  source 1..28: mol_type = other DNA
ggaccagggacacgactcaccgtcctag

SEQ ID NO: 30110 - DNA, 31 bp, synthetic construct; identical to SEQ ID NO: 17910
  source 1..31: mol_type = other DNA

SEQ ID NO: 30111 - DNA, 28 bp, synthetic construct
  source 1..28: mol_type = other DNA
ggagaggggactcgactctctgttctag

SEQ ID NO: 30112 - DNA, 31 bp, synthetic construct; identical to SEQ ID NO: 18944
  source 1..31: mol_type = other DNA

SEQ ID NO: 30113 - DNA, 28 bp, synthetic construct
  source 1..28: mol_type = other DNA
ggtcccggcaccaggctcacggttttag

SEQ ID NO: 30114 - DNA, 31 bp, synthetic construct; identical to SEQ ID NO: 17828
  source 1..31: mol_type = other DNA

SEQ ID NO: 30115 - DNA, 28 bp, synthetic construct
  source 1..28: mol_type = other DNA
ggctcaggaaccagactgactgttctcg

SEQ ID NO: 30116 - DNA, 31 bp, synthetic construct
  source 1..31: mol_type = other DNA
tgggatggtaccgttctcacagttaagccaa

SEQ ID NO: 30117 - DNA, 28 bp, synthetic construct
  source 1..28: mol_type = other DNA
ggaccagggacacgactcaccgtcctag

SEQ ID NO: 30118 - DNA, 31 bp, synthetic construct; identical to SEQ ID NO: 17850
  source 1..31: mol_type = other DNA

SEQ ID NO: 30119 - DNA, 28 bp, synthetic construct
  source 1..28: mol_type = other DNA
ggtcccggcaccaggctcacggttttag

SEQ ID NO: 30120 - DNA, 31 bp, synthetic construct; identical to SEQ ID NO: 17964
  source 1..31: mol_type = other DNA

SEQ ID NO: 30121 - DNA, 28 bp, synthetic construct
  source 1..28: mol_type = other DNA
ggtcccggcaccaggctcacggttttag

SEQ ID NO: 30122 - DNA, 31 bp, synthetic construct; identical to SEQ ID NO: 17838
  source 1..31: mol_type = other DNA

SEQ ID NO: 30123 - DNA, 28 bp, synthetic construct
  source 1..28: mol_type = other DNA
ggtgcgggcacccgactatcggtgctag

SEQ ID NO: 30124 - DNA, 31 bp, synthetic construct; identical to SEQ ID NO: 17810
  source 1..31: mol_type = other DNA

SEQ ID NO: 30125 - DNA, 28 bp, synthetic construct
  source 1..28: mol_type = other DNA
ggtcccggcaccaggctcacggttttag

SEQ ID NO: 30126 - DNA, 31 bp, synthetic construct; identical to SEQ ID NO: 17826
  source 1..31: mol_type = other DNA

SEQ ID NO: 30127 - DNA, 28 bp, synthetic construct
  source 1..28: mol_type = other DNA
ggtcccggcaccaggctcacggttttag

SEQ ID NO: 30128 - DNA, 31 bp, synthetic construct; identical to SEQ ID NO: 17884
  source 1..31: mol_type = other DNA

SEQ ID NO: 30129 - protein, 26 aa, synthetic construct
ETAVFQTPNYHVTQVGNEVSFNCKQT

SEQ ID NO: 30130 - protein, 26 aa, synthetic construct
QQKVQQSPESLIVPEGAMTSLNCTFS

SEQ ID NO: 30131 - protein, 26 aa, synthetic construct
GGIITQTPKFLIGQEGQKLTLKCQQN

SEQ ID NO: 30132 - protein, 26 aa, synthetic construct
GEQVEQLPSSLIVQEGASVLINCSYT

SEQ ID NO: 30133 - protein, 26 aa, synthetic construct
ETAVFQTPNYHVTQVGNEVSFNCKQT

SEQ ID NO: 30134 - protein, 26 aa, synthetic construct
GEKVEQHQSTLSVREGDSAVINCTYT

SEQ ID NO: 30135 - protein, 26 aa, synthetic construct
EAAVTQSPRNKVAVTGGKVTLSCNQT

SEQ ID NO: 30136 - protein, 26 aa, synthetic construct
GEQVEQLPSILRVQEGSSASINCTYE

SEQ ID NO: 30137 - protein, 26 aa, synthetic construct
EAAVTQSPRNKVAVTGGKVTLSCNQT

SEQ ID NO: 30138 - protein, 26 aa, synthetic construct
SQLAEENPWALSVHEGESVTVNCSYK

SEQ ID NO: 30139 - protein, 26 aa, synthetic construct
EAAVTQSPRNKVAVTGGKVTLSCNQT

SEQ ID NO: 30140 - protein, 26 aa, synthetic construct
GDSVTQTEGQVALSEEDFLTIHCNYS

SEQ ID NO: 30141 - protein, 26 aa, synthetic construct
GGIITQTPKFLIGQEGQKLTLKCQQN

SEQ ID NO: 30142 - protein, 26 aa, synthetic construct
QQKVQQSPESLIVPEGAMTSLNCTFS

SEQ ID NO: 30143 - protein, 25 aa, synthetic construct
NTKITQSPRYLILGRANKSLECEQH

SEQ ID NO: 30144 - protein, 26 aa, synthetic construct
GEQVEQLPSSLIVQEGASVLINCSYT

SEQ ID NO: 30145 - protein, 25 aa, synthetic construct
NTKITQSPRYLILGRANKSLECEQH

SEQ ID NO: 30146 - protein, 26 aa, synthetic construct
QQKVQQSPESLIVPEGAMTSLNCTFS

SEQ ID NO: 30147 - protein, 25 aa, synthetic construct
NTKITQSPRYLILGRANKSLECEQH

SEQ ID NO: 30148 - protein, 26 aa, synthetic construct
GDQVEQSPSALSLHEGTDSALRCNFT

SEQ ID NO: 30149 - protein, 25 aa, synthetic construct
NTKITQSPRYLILGRANKSLECEQH

SEQ ID NO: 30150 - protein, 26 aa, synthetic construct
QQKVQQSPESLIVPEGAMTSLNCTFS

SEQ ID NO: 30151 - protein, 25 aa, synthetic construct
NTKITQSPRYLILGRANKSLECEQH

SEQ ID NO: 30152 - protein, 26 aa, synthetic construct
AQKVTQTQTSISVMEKTTVTMDCVYE

SEQ ID NO: 30153 - protein, 25 aa, synthetic construct
NTKITQSPRYLILGRANKSLECEQH

SEQ ID NO: 30154 - protein, 26 aa, synthetic construct
GDSVTQTEGQVTVSESKSLIINCTYS

SEQ ID NO: 30155 - protein, 26 aa, synthetic construct
EAGVTQSPRYAVLQEGQAVSFWCDPI

SEQ ID NO: 30156 - protein, 26 aa, synthetic construct
AQSVTQPDARVTVSEGASLQLRCKYS

SEQ ID NO: 30157 - protein, 26 aa, synthetic construct
EAGVTQSPRYAVLQEGQAVSFWCDPI

SEQ ID NO: 30158 - protein, 26 aa, synthetic construct
GDQVEQSPSALSLHEGTGSALRCNFT

SEQ ID NO: 30159 - protein, 26 aa, synthetic construct
EAGVTQSPRYAVLQEGQAVSFWCDPI

SEQ ID NO: 30160 - protein, 25 aa, synthetic construct
LAKTTQPPSMEAYEGQEVNVSCSHT

SEQ ID NO: 30161 - protein, 26 aa, synthetic construct
DPKIIQKPKYLVAVTGSEKILICEQY

SEQ ID NO: 30162 - protein, 26 aa, synthetic construct
GDSVTQTEGPVTVSESESLIINCTYS

SEQ ID NO: 30163 - protein, 26 aa, synthetic construct
DPKIIQKPKYLVAVTGSEKILICEQY

SEQ ID NO: 30164 - protein, 26 aa, synthetic construct
GDQVEQSPSALSLHEGTGSALRCNFT

SEQ ID NO: 30165 - protein, 26 aa, synthetic construct
ETAVFQTPNYHVTQVGNEVSFNCKQT

SEQ ID NO: 30166 - protein, 26 aa, synthetic construct
GEKVEQHESTLSVREGDSAVINCTYT

SEQ ID NO: 30167 - protein, 26 aa, synthetic construct
ETAVFQTPNYHVTQVGNEVSFNCKQT

SEQ ID NO: 30168 - protein, 26 aa, synthetic construct
GQQVQQSPASLVLQEGENAELQCNFS

SEQ ID NO: 30169 - protein, 26 aa, synthetic construct
ETAVFQTPNYHVTQVGNEVSFNCKQT

SEQ ID NO: 30170 - protein, 26 aa, synthetic construct
GQQVQQSPASLVLQEGENAELQCNFS

SEQ ID NO: 30171 - protein, 26 aa, synthetic construct
EAAVTQSPRNKVAVTGGKVTLSCNQT

SEQ ID NO: 30172 - protein, 26 aa, synthetic construct
GEQVEQLPSILRVQEGSSASINCSYE

SEQ ID NO: 30173 - protein, 26 aa, synthetic construct
EAAVTQSPRNKVAVTGGKVTLSCNQT

SEQ ID NO: 30174 - protein, 26 aa, synthetic construct
AQKVTQTQTSISVMEKTTVTMDCVYE

SEQ ID NO: 30175 - protein, 26 aa, synthetic construct
EAAVTQSPRNKVTVTGGNVTLSCRQT

SEQ ID NO: 30176 - protein, 26 aa, synthetic construct
GDSVIQMQGQVTLSENDFLFINCTYS

SEQ ID NO: 30177 - protein, 26 aa, synthetic construct
EAAVTQSPRNKVTVTGGNVTLSCRQT

SEQ ID NO: 30178 - protein, 26 aa, synthetic construct
GDSVTQTEGQVTVSESKSLIINCTYS

SEQ ID NO: 30179 - protein, 26 aa, synthetic construct
EAAVTQSPRNKVTVTGGNVTLSCRQT

SEQ ID NO: 30180 - protein, 25 aa, synthetic construct
LAKTTQPPSMEAYEGQEVNVSCSHT

SEQ ID NO: 30181 - protein, 26 aa, synthetic construct
EAAVTQSPRNKVTVTGGNVTLSCRQT

SEQ ID NO: 30182 - protein, 26 aa, synthetic construct
AQSVTQPDARVTVSEGASLQLRCKYS

SEQ ID NO: 30183 - protein, 26 aa, synthetic construct
EAAVTQSPRNKVTVTGGNVTLSCRQT

SEQ ID NO: 30184 - protein, 26 aa, synthetic construct
QEKVQQSPESLIVPEGAMSSLNCTFS

SEQ ID NO: 30185 - protein, 26 aa, synthetic construct
EAAVTQSPRNKVTVTGGNVTLSCRQT

SEQ ID NO: 30186 - protein, 26 aa, synthetic construct
QQQVRQSPQSLTVWEGETAILNCSYE

SEQ ID NO: 30187 - protein, 26 aa, synthetic construct
EAAVTQSPRNKVTVTGGNVTLSCRQT

SEQ ID NO: 30188 - protein, 26 aa, synthetic construct
GEQVEQLPSILRVQEGSSASINCSYE

SEQ ID NO: 30189 - protein, 26 aa, synthetic construct
EAAVTQSPRNKVTVTGGNVTLSCRQT

SEQ ID NO: 30190 - protein, 26 aa, synthetic construct
AQKVTQTQTSISVMEKTTVTMDCVYE

SEQ ID NO: 30191 - protein, 26 aa, synthetic construct
EAAVTQSPRSKVAVTGGKVTLSCHQT

SEQ ID NO: 30192 - protein, 26 aa, synthetic construct
QQQVRQSPQSLTVWEGETAILNCSYE

SEQ ID NO: 30193 - protein, 26 aa, synthetic construct
EAAVTQSPRSKVAVTGGKVTLSCHQT

SEQ ID NO: 30194 - protein, 26 aa, synthetic construct
AQKVTQTQTSISVMEKTTVTMDCVYE

SEQ ID NO: 30195 - protein, 26 aa, synthetic construct
EAAVTQSPRSKVAVTGGKVTLSCHQT

SEQ ID NO: 30196 - protein, 26 aa, synthetic construct
GDSVTQTEGLVTLTKGLPVMLNCTYQ

SEQ ID NO: 30197 - protein, 26 aa, synthetic construct
DTTVKQNPRYKLARVGKPVNLICSQT

SEQ ID NO: 30198 - protein, 26 aa, synthetic construct
QQKVQQSPESLSVPEGGMASLNCTSS

SEQ ID NO: 30199 - protein, 26 aa, synthetic construct
AQTIHQWPVAEIKAVGSPLSLGCTIK

SEQ ID NO: 30200 - protein, 26 aa, synthetic construct
AQKVTQTQTSISVMEKTTVTMDCVYE

SEQ ID NO: 30201 - protein, 26 aa, synthetic construct
AQTIHQWPVAEIKAVGSPLSLGCTIK

SEQ ID NO: 30202 - protein, 26 aa, synthetic construct
AQSVTQPDARVTVSEGASLQLRCKYS

SEQ ID NO: 30203 - protein, 26 aa, synthetic construct
GGIITQTPKFLIGQEGQKLTLKCQQN

SEQ ID NO: 30204 - protein, 26 aa, synthetic construct
GDSVTQTEGQVTVSESKSLIINCTYS

SEQ ID NO: 30205 - protein, 26 aa, synthetic construct
GGIITQTPKFLIGQEGQKLTLKCQQN

SEQ ID NO: 30206 - protein, 26 aa, synthetic construct
AQSVDQPDAHVTLSEGASLELRCSYS

SEQ ID NO: 30207 - protein, 26 aa, synthetic construct
GGIITQTPKFLIGQEGQKLTLKCQQN

SEQ ID NO: 30208 - protein, 26 aa, synthetic construct
AQKVTQTQTSISVMEKTTVTMDCVYE

SEQ ID NO: 30209 - protein, 26 aa, synthetic construct
GGIITQTPKFLIGQEGQKLTLKCQQN

SEQ ID NO: 30210 - protein, 26 aa, synthetic construct
GDSVTQTEGQVALSEEDFLTIHCNYS

SEQ ID NO: 30211 - protein, 26 aa, synthetic construct
GGIITQTPKFLIGQEGQKLTLKCQQN

SEQ ID NO: 30212 - protein, 26 aa, synthetic construct
GDSVTQTEGQVTVSESKSLIINCTYS

SEQ ID NO: 30213 - protein, 26 aa, synthetic construct
GGIITQTPKFLIGQEGQKLTLKCQQN

SEQ ID NO: 30214 - protein, 26 aa, synthetic construct
QQKVQQSPESLIVPEGAMTSLNCTFS

SEQ ID NO: 30215 - protein, 26 aa, synthetic construct
VTLLEQNPRWRLVPRGQAVNLRCILK

SEQ ID NO: 30216 - protein, 26 aa, synthetic construct
SQLAEENLWALSVHEGESVTVNCSYK

SEQ ID NO: 30217 - protein, 26 aa, synthetic construct
VTLLEQNPRWRLVPRGQAVNLRCILK

SEQ ID NO: 30218 - protein, 26 aa, synthetic construct
GEQVEQLPSSLIVQEGASVLINCSYT

SEQ ID NO: 30219 - protein, 26 aa, synthetic construct
VTLLEQNPRWRLVPRGQAVNLRCILK

SEQ ID NO: 30220 - protein, 26 aa, synthetic construct
GEKVEQHESTLSVREGDSAVINCTYT

SEQ ID NO: 30221 - protein, 26 aa, synthetic construct
VTLLEQNPRWRLVPRGQAVNLRCILK

SEQ ID NO: 30222 - protein, 26 aa, synthetic construct
GDSVTQKEGLVTLTEGLPVMLNCTYQ

SEQ ID NO: 30223 - protein, 26 aa, synthetic construct
VTLLEQNPRWRLVPRGQAVNLRCILK

SEQ ID NO: 30224 - protein, 26 aa, synthetic construct
GDSVTQTEGQVALSEEDFLTIHCNYS

SEQ ID NO: 30225 - DNA, 78 bp, synthetic construct; identical to SEQ ID NO: 1583
  source 1..78: mol_type = other DNA

SEQ ID NO: 30226 - DNA, 78 bp, synthetic construct; identical to SEQ ID NO: 1860
  source 1..78: mol_type = other DNA

SEQ ID NO: 30227 - DNA, 78 bp, synthetic construct; identical to SEQ ID NO: 1511
  source 1..78: mol_type = other DNA

SEQ ID NO: 30228 - DNA, 78 bp, synthetic construct; identical to SEQ ID NO: 20366
  source 1..78: mol_type = other DNA

SEQ ID NO: 30229 - DNA, 78 bp, synthetic construct; identical to SEQ ID NO: 1583
  source 1..78: mol_type = other DNA

SEQ ID NO: 30230 - DNA, 78 bp, synthetic construct; identical to SEQ ID NO: 1850
  source 1..78: mol_type = other DNA

SEQ ID NO: 30231 - DNA, 78 bp, synthetic construct; identical to SEQ ID NO: 1487
  source 1..78: mol_type = other DNA

SEQ ID NO: 30232 - DNA, 78 bp, synthetic construct; identical to SEQ ID NO: 1862
  source 1..78: mol_type = other DNA

SEQ ID NO: 30233 - DNA, 78 bp, synthetic construct; identical to SEQ ID NO: 1487
  source 1..78: mol_type = other DNA

SEQ ID NO: 30234 - DNA, 78 bp, synthetic construct; identical to SEQ ID NO: 1508
  source 1..78: mol_type = other DNA

SEQ ID NO: 30235 - DNA, 78 bp, synthetic construct; identical to SEQ ID NO: 1487
  source 1..78: mol_type = other DNA

SEQ ID NO: 30236 - DNA, 78 bp, synthetic construct; identical to SEQ ID NO: 1498
  source 1..78: mol_type = other DNA

SEQ ID NO: 30237 - DNA, 78 bp, synthetic construct; identical to SEQ ID NO: 1511
  source 1..78: mol_type = other DNA

SEQ ID NO: 30238 - DNA, 78 bp, synthetic construct; identical to SEQ ID NO: 1860
  source 1..78: mol_type = other DNA

SEQ ID NO: 30239 - DNA, 75 bp, synthetic construct; identical to SEQ ID NO: 1579
  source 1..75: mol_type = other DNA

SEQ ID NO: 30240 - DNA, 78 bp, synthetic construct; identical to SEQ ID NO: 1644
  source 1..78: mol_type = other DNA

SEQ ID NO: 30241 - DNA, 75 bp, synthetic construct; identical to SEQ ID NO: 1579
  source 1..75: mol_type = other DNA

SEQ ID NO: 30242 - DNA, 78 bp, synthetic construct; identical to SEQ ID NO: 1860
  source 1..78: mol_type = other DNA

SEQ ID NO: 30243 - DNA, 75 bp, synthetic construct; identical to SEQ ID NO: 1579
  source 1..75: mol_type = other DNA

SEQ ID NO: 30244 - DNA, 78 bp, synthetic construct; identical to SEQ ID NO: 1502
  source 1..78: mol_type = other DNA

SEQ ID NO: 30245 - DNA, 75 bp, synthetic construct; identical to SEQ ID NO: 1579
  source 1..75: mol_type = other DNA

SEQ ID NO: 30246 - DNA, 78 bp, synthetic construct; identical to SEQ ID NO: 1860
  source 1..78: mol_type = other DNA

SEQ ID NO: 30247 - DNA, 75 bp, synthetic construct; identical to SEQ ID NO: 1579
  source 1..75: mol_type = other DNA

SEQ ID NO: 30248 - DNA, 78 bp, synthetic construct; identical to SEQ ID NO: 1528
  source 1..78: mol_type = other DNA

SEQ ID NO: 30249 - DNA, 75 bp, synthetic construct; identical to SEQ ID NO: 1579
  source 1..75: mol_type = other DNA

SEQ ID NO: 30250 - DNA, 78 bp, synthetic construct; identical to SEQ ID NO: 1846
  source 1..78: mol_type = other DNA

SEQ ID NO: 30251 - DNA, 78 bp, synthetic construct; identical to SEQ ID NO: 1485
  source 1..78: mol_type = other DNA

SEQ ID NO: 30252 - DNA, 78 bp, synthetic construct; identical to SEQ ID NO: 1496
  source 1..78: mol_type = other DNA

SEQ ID NO: 30253 - DNA, 78 bp, synthetic construct; identical to SEQ ID NO: 1485
  source 1..78: mol_type = other DNA

SEQ ID NO: 30254 - DNA, 78 bp, synthetic construct; identical to SEQ ID NO: 1770
  source 1..78: mol_type = other DNA

SEQ ID NO: 30255 - DNA, 78 bp, synthetic construct; identical to SEQ ID NO: 1485
  source 1..78: mol_type = other DNA

SEQ ID NO: 30256 - DNA, 75 bp, synthetic construct; identical to SEQ ID NO: 1590
  source 1..75: mol_type = other DNA

SEQ ID NO: 30257 - DNA, 78 bp, synthetic construct; identical to SEQ ID NO: 1499
  source 1..78: mol_type = other DNA

SEQ ID NO: 30258 - DNA, 78 bp, synthetic construct; identical to SEQ ID NO: 1614
  source 1..78: mol_type = other DNA

SEQ ID NO: 30259 - DNA, 78 bp, synthetic construct; identical to SEQ ID NO: 1499
  source 1..78: mol_type = other DNA

SEQ ID NO: 30260 - DNA, 78 bp, synthetic construct; identical to SEQ ID NO: 1596
  source 1..78: mol_type = other DNA

SEQ ID NO: 30261 - DNA, 78 bp, synthetic construct; identical to SEQ ID NO: 1583
  source 1..78: mol_type = other DNA

SEQ ID NO: 30262 - DNA, 78 bp, synthetic construct; identical to SEQ ID NO: 1538
  source 1..78: mol_type = other DNA

SEQ ID NO: 30263 - DNA, 78 bp, synthetic construct; identical to SEQ ID NO: 1583
  source 1..78: mol_type = other DNA

SEQ ID NO: 30264 - DNA, 78 bp, synthetic construct; identical to SEQ ID NO: 1540
  source 1..78: mol_type = other DNA

SEQ ID NO: 30265 - DNA, 78 bp, synthetic construct; identical to SEQ ID NO: 1583
  source 1..78: mol_type = other DNA

SEQ ID NO: 30266 - DNA, 78 bp, synthetic construct; identical to SEQ ID NO: 1740
  source 1..78: mol_type = other DNA

SEQ ID NO: 30267 - DNA, 78 bp, synthetic construct; identical to SEQ ID NO: 1487
  source 1..78: mol_type = other DNA

SEQ ID NO: 30268 - DNA, 78 bp, synthetic construct; identical to SEQ ID NO: 1532
  source 1..78: mol_type = other DNA

SEQ ID NO: 30269 - DNA, 78 bp, synthetic construct; identical to SEQ ID NO: 1487
  source 1..78: mol_type = other DNA

SEQ ID NO: 30270 - DNA, 78 bp, synthetic construct; identical to SEQ ID NO: 1528
  source 1..78: mol_type = other DNA

SEQ ID NO: 30271 - DNA, 78 bp, synthetic construct; identical to SEQ ID NO: 1521
  source 1..78: mol_type = other DNA

SEQ ID NO: 30272 - DNA, 78 bp, synthetic construct; identical to SEQ ID NO: 1940
  source 1..78: mol_type = other DNA

SEQ ID NO: 30273 - DNA, 78 bp, synthetic construct; identical to SEQ ID NO: 1521
  source 1..78: mol_type = other DNA

SEQ ID NO: 30274 - DNA, 78 bp, synthetic construct; identical to SEQ ID NO: 1544
  source 1..78: mol_type = other DNA

SEQ ID NO: 30275 - DNA, 78 bp, synthetic construct; identical to SEQ ID NO: 1521
  source 1..78: mol_type = other DNA

SEQ ID NO: 30276 - DNA, 75 bp, synthetic construct; identical to SEQ ID NO: 1590
  source 1..75: mol_type = other DNA

SEQ ID NO: 30277 - DNA, 78 bp, synthetic construct; identical to SEQ ID NO: 1521
  source 1..78: mol_type = other DNA

SEQ ID NO: 30278 - DNA, 78 bp, synthetic construct; identical to SEQ ID NO: 1504
  source 1..78: mol_type = other DNA

SEQ ID NO: 30279 - DNA, 78 bp, synthetic construct; identical to SEQ ID NO: 1521
  source 1..78: mol_type = other DNA

SEQ ID NO: 30280 - DNA, 78 bp, synthetic construct; identical to SEQ ID NO: 1580
  source 1..78: mol_type = other DNA

SEQ ID NO: 30281 - DNA, 78 bp, synthetic construct; identical to SEQ ID NO: 1521
  source 1..78: mol_type = other DNA

SEQ ID NO: 30282 - DNA, 78 bp, synthetic construct; identical to SEQ ID NO: 1608
  source 1..78: mol_type = other DNA

SEQ ID NO: 30283 - DNA, 78 bp, synthetic construct; identical to SEQ ID NO: 1521
  source 1..78: mol_type = other DNA

SEQ ID NO: 30284 - DNA, 78 bp, synthetic construct; identical to SEQ ID NO: 1532
  source 1..78: mol_type = other DNA

SEQ ID NO: 30285 - DNA, 78 bp, synthetic construct; identical to SEQ ID NO: 1521
  source 1..78: mol_type = other DNA

SEQ ID NO: 30286 - DNA, 78 bp, synthetic construct; identical to SEQ ID NO: 1528
  source 1..78: mol_type = other DNA

SEQ ID NO: 30287 - DNA, 78 bp, synthetic construct; identical to SEQ ID NO: 1491
  source 1..78: mol_type = other DNA

SEQ ID NO: 30288 - DNA, 78 bp, synthetic construct; identical to SEQ ID NO: 1608
  source 1..78: mol_type = other DNA

SEQ ID NO: 30289 - DNA, 78 bp, synthetic construct; identical to SEQ ID NO: 1491
  source 1..78: mol_type = other DNA

SEQ ID NO: 30290 - DNA, 78 bp, synthetic construct; identical to SEQ ID NO: 1528
  source 1..78: mol_type = other DNA

SEQ ID NO: 30291 - DNA, 78 bp, synthetic construct; identical to SEQ ID NO: 1491
  source 1..78: mol_type = other DNA

SEQ ID NO: 30292 - DNA, 78 bp, synthetic construct; identical to SEQ ID NO: 1492
  source 1..78: mol_type = other DNA

SEQ ID NO: 30293 - DNA, 78 bp, synthetic construct; identical to SEQ ID NO: 1783
  source 1..78: mol_type = other DNA

SEQ ID NO: 30294 - DNA, 78 bp, synthetic construct; identical to SEQ ID NO: 1548
  source 1..78: mol_type = other DNA

SEQ ID NO: 30295 - DNA, 78 bp, synthetic construct; identical to SEQ ID NO: 1519
  source 1..78: mol_type = other DNA

SEQ ID NO: 30296 - DNA, 78 bp, synthetic construct; identical to SEQ ID NO: 1528
  source 1..78: mol_type = other DNA

SEQ ID NO: 30297 - DNA, 78 bp, synthetic construct; identical to SEQ ID NO: 1519
  source 1..78: mol_type = other DNA

SEQ ID NO: 30298 - DNA, 78 bp, synthetic construct; identical to SEQ ID NO: 1514
  source 1..78: mol_type = other DNA

SEQ ID NO: 30299 - DNA, 78 bp, synthetic construct; identical to SEQ ID NO: 1511
  source 1..78: mol_type = other DNA

SEQ ID NO: 30300 - DNA, 78 bp, synthetic construct; identical to SEQ ID NO: 1544
  source 1..78: mol_type = other DNA

SEQ ID NO: 30301 - DNA, 78 bp, synthetic construct; identical to SEQ ID NO: 1511
  source 1..78: mol_type = other DNA

SEQ ID NO: 30302 - DNA, 78 bp, synthetic construct; identical to SEQ ID NO: 1764
  source 1..78: mol_type = other DNA

SEQ ID NO: 30303 - DNA, 78 bp, synthetic construct; identical to SEQ ID NO: 1511
  source 1..78: mol_type = other DNA

SEQ ID NO: 30304 - DNA, 78 bp, synthetic construct; identical to SEQ ID NO: 1528
  source 1..78: mol_type = other DNA

SEQ ID NO: 30305 - DNA, 78 bp, synthetic construct; identical to SEQ ID NO: 1511
  source 1..78: mol_type = other DNA

SEQ ID NO: 30306 - DNA, 78 bp, synthetic construct; identical to SEQ ID NO: 1498
  source 1..78: mol_type = other DNA

SEQ ID NO: 30307 - DNA, 78 bp, synthetic construct; identical to SEQ ID NO: 1511
  source 1..78: mol_type = other DNA

SEQ ID NO: 30308 - DNA, 78 bp, synthetic construct; identical to SEQ ID NO: 1544
  source 1..78: mol_type = other DNA

SEQ ID NO: 30309 - DNA, 78 bp, synthetic construct; identical to SEQ ID NO: 1511
  source 1..78: mol_type = other DNA

SEQ ID NO: 30310 - DNA, 78 bp, synthetic construct; identical to SEQ ID NO: 1860
  source 1..78: mol_type = other DNA

SEQ ID NO: 30311 - DNA, 78 bp, synthetic construct; identical to SEQ ID NO: 1507
  source 1..78: mol_type = other DNA

SEQ ID NO: 30312 - DNA, 78 bp, synthetic construct; identical to SEQ ID NO: 1674
  source 1..78: mol_type = other DNA

SEQ ID NO: 30313 - DNA, 78 bp, synthetic construct; identical to SEQ ID NO: 1507
  source 1..78: mol_type = other DNA

SEQ ID NO: 30314 - DNA, 78 bp, synthetic construct; identical to SEQ ID NO: 1644
  source 1..78: mol_type = other DNA

SEQ ID NO: 30315 - DNA, 78 bp, synthetic construct; identical to SEQ ID NO: 1507
  source 1..78: mol_type = other DNA

SEQ ID NO: 30316 - DNA, 78 bp, synthetic construct; identical to SEQ ID NO: 1796
  source 1..78: mol_type = other DNA

SEQ ID NO: 30317 - DNA, 78 bp, synthetic construct; identical to SEQ ID NO: 1507
  source 1..78: mol_type = other DNA

SEQ ID NO: 30318 - DNA, 78 bp, synthetic construct; identical to SEQ ID NO: 2374
  source 1..78: mol_type = other DNA

SEQ ID NO: 30319 - DNA, 78 bp, synthetic construct; identical to SEQ ID NO: 1507
  source 1..78: mol_type = other DNA

SEQ ID NO: 30320 - DNA, 78 bp, synthetic construct; identical to SEQ ID NO: 1498
  source 1..78: mol_type = other DNA

SEQ ID NO: 30321 - protein, 5 aa, synthetic construct
LGHDT

SEQ ID NO: 30322 - protein, 6 aa, synthetic construct
DSASQY

SEQ ID NO: 30323 - protein, 5 aa, synthetic construct
FNHDT

SEQ ID NO: 30324 - protein, 6 aa, synthetic construct
DSASVY

SEQ ID NO: 30325 - protein, 5 aa, synthetic construct
LGHDT

SEQ ID NO: 30326 - protein, 6 aa, synthetic construct
DTASSY

SEQ ID NO: 30327 - protein, 5 aa, synthetic construct
NNHNN

SEQ ID NO: 30328 - protein, 6 aa, synthetic construct
NSASNY

SEQ ID NO: 30329 - protein, 5 aa, synthetic construct
NNHNN

SEQ ID NO: 30330 - protein, 5 aa, synthetic construct
TSITA

SEQ ID NO: 30331 - protein, 5 aa, synthetic construct
NNHNN

SEQ ID NO: 30332 - protein, 6 aa, synthetic construct
ASGYPA

SEQ ID NO: 30333 - protein, 5 aa, synthetic construct
FNHDT

SEQ ID NO: 30334 - protein, 6 aa, synthetic construct
DSASQY

SEQ ID NO: 30335 - protein, 5 aa, synthetic construct
LGHNA

SEQ ID NO: 30336 - protein, 6 aa, synthetic construct
DSASVY

SEQ ID NO: 30337 - protein, 5 aa, synthetic construct
LGHNA

SEQ ID NO: 30338 - protein, 6 aa, synthetic construct
DSASQY

SEQ ID NO: 30339 - protein, 5 aa, synthetic construct
LGHNA

SEQ ID NO: 30340 - protein, 5 aa, synthetic construct
TTMRS

SEQ ID NO: 30341 - protein, 5 aa, synthetic construct
LGHNA

SEQ ID NO: 30342 - protein, 6 aa, synthetic construct
DSASQY

SEQ ID NO: 30343 - protein, 5 aa, synthetic construct
LGHNA

SEQ ID NO: 30344 - protein, 7 aa, synthetic construct
TRDSSYF

SEQ ID NO: 30345 - protein, 5 aa, synthetic construct
LGHNA

SEQ ID NO: 30346 - protein, 8 aa, synthetic construct
ATSIGYPN

SEQ ID NO: 30347 - protein, 5 aa, synthetic construct
SGHDT

SEQ ID NO: 30348 - protein, 6 aa, synthetic construct
YSATPY

SEQ ID NO: 30349 - protein, 5 aa, synthetic construct
SGHDT

SEQ ID NO: 30350 - protein, 5 aa, synthetic construct
TTMRA

SEQ ID NO: 30351 - protein, 5 aa, synthetic construct
SGHDT

SEQ ID NO: 30352 - protein, 7 aa, synthetic construct
NIATSEY

SEQ ID NO: 30353 - protein, 5 aa, synthetic construct
LGHNA

SEQ ID NO: 30354 - protein, 8 aa, synthetic construct
ATSIAYPN

SEQ ID NO: 30355 - protein, 5 aa, synthetic construct
LGHNA

SEQ ID NO: 30356 - protein, 5 aa, synthetic construct
TTMRA

SEQ ID NO: 30357 - protein, 5 aa, synthetic construct
LGHDT

SEQ ID NO: 30358 - protein, 6 aa, synthetic construct
DTASSY

SEQ ID NO: 30359 - protein, 5 aa, synthetic construct
LGHDT

SEQ ID NO: 30360 - protein, 5 aa, synthetic construct
TSLNS

SEQ ID NO: 30361 - protein, 5 aa, synthetic construct
LGHDT

SEQ ID NO: 30362 - protein, 5 aa, synthetic construct
TSLNS

SEQ ID NO: 30363 - protein, 5 aa, synthetic construct
NNHNN

SEQ ID NO: 30364 - protein, 6 aa, synthetic construct
DSASNY

SEQ ID NO: 30365 - protein, 5 aa, synthetic construct
NNHNN

SEQ ID NO: 30366 - protein, 7 aa, synthetic construct
TQDSSYF

SEQ ID NO: 30367 - protein, 5 aa, synthetic construct
NSHNY

SEQ ID NO: 30368 - protein, 6 aa, synthetic construct
TTGYPT

SEQ ID NO: 30369 - protein, 5 aa, synthetic construct
NSHNY

SEQ ID NO: 30370 - protein, 8 aa, synthetic construct
TTSIAYPN

SEQ ID NO: 30371 - protein, 5 aa, synthetic construct
NSHNY

SEQ ID NO: 30372 - protein, 7 aa, synthetic construct
NIATSEY

SEQ ID NO: 30373 - protein, 5 aa, synthetic construct
NSHNY

SEQ ID NO: 30374 - protein, 6 aa, synthetic construct
SSVTPY

SEQ ID NO: 30375 - protein, 5 aa, synthetic construct
NSHNY

SEQ ID NO: 30376 - protein, 6 aa, synthetic construct
NSASQS

SEQ ID NO: 30377 - protein, 5 aa, synthetic construct
NSHNY

SEQ ID NO: 30378 - protein, 6 aa, synthetic construct
NSAFDY

SEQ ID NO: 30379 - protein, 5 aa, synthetic construct
NSHNY

SEQ ID NO: 30380 - protein, 6 aa, synthetic construct
DSASNY

SEQ ID NO: 30381 - protein, 5 aa, synthetic construct
NSHNY

SEQ ID NO: 30382 - protein, 7 aa, synthetic construct
TQDSSYF

SEQ ID NO: 30383 - protein, 5 aa, synthetic construct
NNHDY

SEQ ID NO: 30384 - protein, 6 aa, synthetic construct
DSTFNY

SEQ ID NO: 30385 - protein, 5 aa, synthetic construct
NNHDY

SEQ ID NO: 30386 - protein, 7 aa, synthetic construct
TRDSSYF

SEQ ID NO: 30387 - protein, 5 aa, synthetic construct
NNHDY

SEQ ID NO: 30388 - protein, 6 aa, synthetic construct
TTYSPF

SEQ ID NO: 30389 - protein, 5 aa, synthetic construct
MNHDT

SEQ ID NO: 30390 - protein, 6 aa, synthetic construct
DRNFQY

SEQ ID NO: 30391 - protein, 6 aa, synthetic construct
GKSSPN

SEQ ID NO: 30392 - protein, 7 aa, synthetic construct
TQDSSYF

SEQ ID NO: 30393 - protein, 6 aa, synthetic construct
GKSSPN

SEQ ID NO: 30394 - protein, 6 aa, synthetic construct
YFGTPY

SEQ ID NO: 30395 - protein, 5 aa, synthetic construct
FNHDT

SEQ ID NO: 30396 - protein, 8 aa, synthetic construct
TTSIAYPN

SEQ ID NO: 30397 - protein, 5 aa, synthetic construct
FNHDT

SEQ ID NO: 30398 - protein, 6 aa, synthetic construct
YSAAPY

SEQ ID NO: 30399 - protein, 5 aa, synthetic construct
FNHDT

SEQ ID NO: 30400 - protein, 7 aa, synthetic construct
TRDSSYF

SEQ ID NO: 30401 - protein, 5 aa, synthetic construct
FNHDT

SEQ ID NO: 30402 - protein, 6 aa, synthetic construct
ASGYPT

SEQ ID NO: 30403 - protein, 5 aa, synthetic construct
FNHDT

SEQ ID NO: 30404 - protein, 8 aa, synthetic construct
ATSIAYPN

SEQ ID NO: 30405 - protein, 5 aa, synthetic construct
FNHDT

SEQ ID NO: 30406 - protein, 6 aa, synthetic construct
DSASQY

SEQ ID NO: 30407 - protein, 6 aa, synthetic construct
NSQYPW

SEQ ID NO: 30408 - protein, 5 aa, synthetic construct
TSITA

SEQ ID NO: 30409 - protein, 6 aa, synthetic construct
NSQYPW

SEQ ID NO: 30410 - protein, 6 aa, synthetic construct
DSASVY

SEQ ID NO: 30411 - protein, 6 aa, synthetic construct
NSQYPW

SEQ ID NO: 30412 - protein, 6 aa, synthetic construct
DTASSY

SEQ ID NO: 30413 - protein, 6 aa, synthetic construct
NSQYPW

SEQ ID NO: 30414 - protein, 7 aa, synthetic construct
TIYSNAF

SEQ ID NO: 30415 - protein, 6 aa, synthetic construct
NSQYPW

SEQ ID NO: 30416 - protein, 6 aa, synthetic construct
ASGYPT

SEQ ID NO: 30417 - DNA, 15 bp, synthetic construct
  source 1..15: mol_type = other DNA
ctgggccacgatact

SEQ ID NO: 30418 - DNA, 18 bp, synthetic construct
  source 1..18: mol_type = other DNA
gacagtgcttctcagtat

SEQ ID NO: 30419 - DNA, 15 bp, synthetic construct
  source 1..15: mol_type = other DNA
ttcaatcatgataca

SEQ ID NO: 30420 - DNA, 18 bp, synthetic construct
  source 1..18: mol_type = other DNA
gacagtgcctctgtctac

SEQ ID NO: 30421 - DNA, 15 bp, synthetic construct
  source 1..15: mol_type = other DNA
ctgggccacgatact

SEQ ID NO: 30422 - DNA, 18 bp, synthetic construct
  source 1..18: mol_type = other DNA
gatactgcctcatcatac

SEQ ID NO: 30423 - DNA, 15 bp, synthetic construct
  source 1..15: mol_type = other DNA
aataaccacaacaac

SEQ ID NO: 30424 - DNA, 18 bp, synthetic construct
  source 1..18: mol_type = other DNA
aacagtgcctccaactac

SEQ ID NO: 30425 - DNA, 15 bp, synthetic construct
  source 1..15: mol_type = other DNA
aataaccacaacaac

SEQ ID NO: 30426 - DNA, 15 bp, synthetic construct
  source 1..15: mol_type = other DNA
acatccataactgcc

SEQ ID NO: 30427 - DNA, 15 bp, synthetic construct
  source 1..15: mol_type = other DNA
aataaccacaacaac

SEQ ID NO: 30428 - DNA, 18 bp, synthetic construct
  source 1..18: mol_type = other DNA
gcctcagggtacccagct

SEQ ID NO: 30429 - DNA, 15 bp, synthetic construct
  source 1..15: mol_type = other DNA
ttcaatcatgataca

SEQ ID NO: 30430 - DNA, 18 bp, synthetic construct
  source 1..18: mol_type = other DNA
gacagtgcttctcagtat

SEQ ID NO: 30431 - DNA, 15 bp, synthetic construct
  source 1..15: mol_type = other DNA
ctgggacataatgct

SEQ ID NO: 30432 - DNA, 18 bp, synthetic construct
  source 1..18: mol_type = other DNA
gacagtgcctctgtctac

SEQ ID NO: 30433 - DNA, 15 bp, synthetic construct
  source 1..15: mol_type = other DNA
ctgggacataatgct

SEQ ID NO: 30434 - DNA, 18 bp, synthetic construct
  source 1..18: mol_type = other DNA
gacagtgcttctcagtat

SEQ ID NO: 30435 - DNA, 15 bp, synthetic construct
  source 1..15: mol_type = other DNA
ctgggacataatgct

SEQ ID NO: 30436 - DNA, 15 bp, synthetic construct
  source 1..15: mol_type = other DNA
accaccatgaggagt

SEQ ID NO: 30437 - DNA, 15 bp, synthetic construct
  source 1..15: mol_type = other DNA
ctgggacataatgct

SEQ ID NO: 30438 - DNA, 18 bp, synthetic construct
  source 1..18: mol_type = other DNA
gacagtgcttctcagtat

SEQ ID NO: 30439 - DNA, 15 bp, synthetic construct
  source 1..15: mol_type = other DNA
ctgggacataatgct

SEQ ID NO: 30440 - DNA, 21 bp, synthetic construct
  source 1..21: mol_type = other DNA
acccgggacagttcttacttc

SEQ ID NO: 30441 - DNA, 15 bp, synthetic construct
  source 1..15: mol_type = other DNA
ctgggacataatgct

SEQ ID NO: 30442 - DNA, 24 bp, synthetic construct
  source 1..24: mol_type = other DNA
gccacaagcataggttaccctaat

SEQ ID NO: 30443 - DNA, 15 bp, synthetic construct
  source 1..15: mol_type = other DNA
tctggacatgatacc

SEQ ID NO: 30444 - DNA, 18 bp, synthetic construct
  source 1..18: mol_type = other DNA
tactctgcgacaccttat

SEQ ID NO: 30445 - DNA, 15 bp, synthetic construct
  source 1..15: mol_type = other DNA
tctggacatgatacc

SEQ ID NO: 30446 - DNA, 15 bp, synthetic construct
  source 1..15: mol_type = other DNA
accaccatgagggct

SEQ ID NO: 30447 - DNA, 15 bp, synthetic construct
  source 1..15: mol_type = other DNA
tctggacatgatacc

SEQ ID NO: 30448 - DNA, 21 bp, synthetic construct
  source 1..21: mol_type = other DNA
aacattgctacaagcgagtac

SEQ ID NO: 30449 - DNA, 15 bp, synthetic construct
  source 1..15: mol_type = other DNA
ctaggccacaatgct

SEQ ID NO: 30450 - DNA, 24 bp, synthetic construct
  source 1..24: mol_type = other DNA
gccacaagcatagcttaccctaat

SEQ ID NO: 30451 - DNA, 15 bp, synthetic construct
  source 1..15: mol_type = other DNA
ctaggccacaatgct

SEQ ID NO: 30452 - DNA, 15 bp, synthetic construct
  source 1..15: mol_type = other DNA
accaccatgagggct

SEQ ID NO: 30453 - DNA, 15 bp, synthetic construct
  source 1..15: mol_type = other DNA
ctgggccacgatact

SEQ ID NO: 30454 - DNA, 18 bp, synthetic construct
  source 1..18: mol_type = other DNA
gatactgcctcatcatac

SEQ ID NO: 30455 - DNA, 15 bp, synthetic construct
  source 1..15: mol_type = other DNA
ctgggccacgatact

SEQ ID NO: 30456 - DNA, 15 bp, synthetic construct
  source 1..15: mol_type = other DNA
acatctttgaacagt

SEQ ID NO: 30457 - DNA, 15 bp, synthetic construct
  source 1..15: mol_type = other DNA
ctgggccacgatact

SEQ ID NO: 30458 - DNA, 15 bp, synthetic construct
  source 1..15: mol_type = other DNA
acatctttgaacagt

SEQ ID NO: 30459 - DNA, 15 bp, synthetic construct
  source 1..15: mol_type = other DNA
aataaccacaacaac

SEQ ID NO: 30460 - DNA, 18 bp, synthetic construct
  source 1..18: mol_type = other DNA
gacagtgcctccaactac

SEQ ID NO: 30461 - DNA, 15 bp, synthetic construct
  source 1..15: mol_type = other DNA
aataaccacaacaac

SEQ ID NO: 30462 - DNA, 21 bp, synthetic construct
  source 1..21: mol_type = other DNA
acccaggacagttcttacttc

SEQ ID NO: 30463 - DNA, 15 bp, synthetic construct
  source 1..15: mol_type = other DNA
aatagccacaactac

SEQ ID NO: 30464 - DNA, 18 bp, synthetic construct
  source 1..18: mol_type = other DNA
accacagggtacccgact

SEQ ID NO: 30465 - DNA, 15 bp, synthetic construct
  source 1..15: mol_type = other DNA
aatagccacaactac

SEQ ID NO: 30466 - DNA, 24 bp, synthetic construct
  source 1..24: mol_type = other DNA
accacaagcatagcttaccctaat

SEQ ID NO: 30467 - DNA, 15 bp, synthetic construct
  source 1..15: mol_type = other DNA
aatagccacaactac

SEQ ID NO: 30468 - DNA, 21 bp, synthetic construct
  source 1..21: mol_type = other DNA
aacattgctacaagcgagtac

SEQ ID NO: 30469 - DNA, 15 bp, synthetic construct
  source 1..15: mol_type = other DNA
aatagccacaactac

SEQ ID NO: 30470 - DNA, 18 bp, synthetic construct
  source 1..18: mol_type = other DNA
tcctctgtgacaccttat

SEQ ID NO: 30471 - DNA, 15 bp, synthetic construct
  source 1..15: mol_type = other DNA
aatagccacaactac

SEQ ID NO: 30472 - DNA, 18 bp, synthetic construct
  source 1..18: mol_type = other DNA
aacagtgcttctcagtcc

SEQ ID NO: 30473 - DNA, 15 bp, synthetic construct
  source 1..15: mol_type = other DNA
aatagccacaactac

SEQ ID NO: 30474 - DNA, 18 bp, synthetic construct
  source 1..18: mol_type = other DNA
aacagtgcttttgactac

SEQ ID NO: 30475 - DNA, 15 bp, synthetic construct
  source 1..15: mol_type = other DNA
aatagccacaactac

SEQ ID NO: 30476 - DNA, 18 bp, synthetic construct
  source 1..18: mol_type = other DNA
gacagtgcctccaactac

SEQ ID NO: 30477 - DNA, 15 bp, synthetic construct
  source 1..15: mol_type = other DNA
aatagccacaactac

SEQ ID NO: 30478 - DNA, 21 bp, synthetic construct
  source 1..21: mol_type = other DNA
acccaggacagttcttacttc

SEQ ID NO: 30479 - DNA, 15 bp, synthetic construct
  source 1..15: mol_type = other DNA
aataaccatgactat

SEQ ID NO: 30480 - DNA, 18 bp, synthetic construct
  source 1..18: mol_type = other DNA
gacagcacttttaactac

SEQ ID NO: 30481 - DNA, 15 bp, synthetic construct
  source 1..15: mol_type = other DNA
aataaccatgactat

SEQ ID NO: 30482 - DNA, 21 bp, synthetic construct
  source 1..21: mol_type = other DNA
acccgggacagttcttacttc

SEQ ID NO: 30483 - DNA, 15 bp, synthetic construct
  source 1..15: mol_type = other DNA
aataaccatgactat

SEQ ID NO: 30484 - DNA, 18 bp, synthetic construct
  source 1..18: mol_type = other DNA
actacttactcacctttc

SEQ ID NO: 30485 - DNA, 15 bp, synthetic construct
  source 1..15: mol_type = other DNA
atgaatcatgatacc

SEQ ID NO: 30486 - DNA, 18 bp, synthetic construct
  source 1..18: mol_type = other DNA
gatcgtaattttcagtac

SEQ ID NO: 30487 - DNA, 18 bp, synthetic construct
  source 1..18: mol_type = other DNA
gggaaatcaagccctaac

SEQ ID NO: 30488 - DNA, 21 bp, synthetic construct
  source 1..21: mol_type = other DNA
acccaggacagttcttacttc

SEQ ID NO: 30489 - DNA, 18 bp, synthetic construct
  source 1..18: mol_type = other DNA
gggaaatcaagccctaac

SEQ ID NO: 30490 - DNA, 18 bp, synthetic construct
  source 1..18: mol_type = other DNA
tactttgggacaccttat

SEQ ID NO: 30491 - DNA, 15 bp, synthetic construct
  source 1..15: mol_type = other DNA
ttcaatcatgataca

SEQ ID NO: 30492 - DNA, 24 bp, synthetic construct
  source 1..24: mol_type = other DNA
accacaagcatagcttaccctaat

SEQ ID NO: 30493 - DNA, 15 bp, synthetic construct
  source 1..15: mol_type = other DNA
ttcaatcatgataca

SEQ ID NO: 30494 - DNA, 18 bp, synthetic construct
  source 1..18: mol_type = other DNA
tacagtgcagcaccttac

SEQ ID NO: 30495 - DNA, 15 bp, synthetic construct
  source 1..15: mol_type = other DNA
ttcaatcatgataca

SEQ ID NO: 30496 - DNA, 21 bp, synthetic construct
  source 1..21: mol_type = other DNA
acccgggacagttcttacttc

SEQ ID NO: 30497 - DNA, 15 bp, synthetic construct
  source 1..15: mol_type = other DNA
ttcaatcatgataca

SEQ ID NO: 30498 - DNA, 18 bp, synthetic construct
  source 1..18: mol_type = other DNA
gcctcagggtacccaacc

SEQ ID NO: 30499 - DNA, 15 bp, synthetic construct
  source 1..15: mol_type = other DNA
ttcaatcatgataca

SEQ ID NO: 30500 - DNA, 24 bp, synthetic construct
  source 1..24: mol_type = other DNA
gccacaagcatagcttaccctaat

SEQ ID NO: 30501 - DNA, 15 bp, synthetic construct
  source 1..15: mol_type = other DNA
ttcaatcatgataca

SEQ ID NO: 30502 - DNA, 18 bp, synthetic construct
  source 1..18: mol_type = other DNA
gacagtgcttctcagtat

SEQ ID NO: 30503 - DNA, 18 bp, synthetic construct
  source 1..18: mol_type = other DNA
aattcccagtatccctgg

SEQ ID NO: 30504 - DNA, 15 bp, synthetic construct
  source 1..15: mol_type = other DNA
acatccataactgcc

SEQ ID NO: 30505 - DNA, 18 bp, synthetic construct
  source 1..18: mol_type = other DNA
aattcccagtatccctgg

SEQ ID NO: 30506 - DNA, 18 bp, synthetic construct
  source 1..18: mol_type = other DNA
gacagtgcctctgtctac

SEQ ID NO: 30507 - DNA, 18 bp, synthetic construct
  source 1..18: mol_type = other DNA
aattcccagtatccctgg

SEQ ID NO: 30508 - DNA, 18 bp, synthetic construct
  source 1..18: mol_type = other DNA
gatactgcttcatcatac

SEQ ID NO: 30509 - DNA, 18 bp, synthetic construct
  source 1..18: mol_type = other DNA
aattcccagtatccctgg

SEQ ID NO: 30510 - DNA, 21 bp, synthetic construct
  source 1..21: mol_type = other DNA
actatttactcaaatgctttc

SEQ ID NO: 30511 - DNA, 18 bp, synthetic construct
  source 1..18: mol_type = other DNA
aattcccagtatccctgg

SEQ ID NO: 30512 - DNA, 18 bp, synthetic construct
  source 1..18: mol_type = other DNA
gcctcagggtacccaacc

SEQ ID NO: 30513 - protein, 17 aa, synthetic construct
MYWYKQDSKKLLKIMFS

SEQ ID NO: 30514 - protein, 17 aa, synthetic construct
FAWYRQHSGKAPKALMS

SEQ ID NO: 30515 - protein, 17 aa, synthetic construct
MYWYRQDSGKGLRLIYY

SEQ ID NO: 30516 - protein, 17 aa, synthetic construct
FPWYKQEPGKRLQFIID

SEQ ID NO: 30517 - protein, 17 aa, synthetic construct
MYWYKQDSKKLLKIMFS

SEQ ID NO: 30518 - protein, 17 aa, synthetic construct
FPWYKQEAGKSLHFVID

SEQ ID NO: 30519 - protein, 17 aa, synthetic construct
MYWYRQDTGHGLRLIHY

SEQ ID NO: 30520 - protein, 17 aa, synthetic construct
FPWYKQEPGENPKLIID

SEQ ID NO: 30521 - protein, 17 aa, synthetic construct
MYWYRQDTGHGLRLIHY

SEQ ID NO: 30522 - protein, 17 aa, synthetic construct
LQWYRQKSGEGPAQLIL

SEQ ID NO: 30523 - protein, 17 aa, synthetic construct
MYWYRQDTGHGLRLIHY

SEQ ID NO: 30524 - protein, 17 aa, synthetic construct
LFWYVQYPGEGPQFLFR

SEQ ID NO: 30525 - protein, 17 aa, synthetic construct
MYWYRQDSGKGLRLIYY

SEQ ID NO: 30526 - protein, 17 aa, synthetic construct
FAWYRQHSGKAPKALMS

SEQ ID NO: 30527 - protein, 17 aa, synthetic construct
MYWYKQSAEKPPELMFL

SEQ ID NO: 30528 - protein, 17 aa, synthetic construct
FPWYKQEPGKRLQFIID

SEQ ID NO: 30529 - protein, 17 aa, synthetic construct
MYWYKQSAEKPPELMFL

SEQ ID NO: 30530 - protein, 17 aa, synthetic construct
FAWYRQHSGKAPKALMS

SEQ ID NO: 30531 - protein, 17 aa, synthetic construct
MYWYKQSAEKPPELMFL

SEQ ID NO: 30532 - protein, 17 aa, synthetic construct
VQWFRQNSRGSLISLFY

SEQ ID NO: 30533 - protein, 17 aa, synthetic construct
MYWYKQSAEKPPELMFL

SEQ ID NO: 30534 - protein, 17 aa, synthetic construct
FAWYRQHSGKAPKALMS

SEQ ID NO: 30535 - protein, 17 aa, synthetic construct
MYWYKQSAEKPPELMFL

SEQ ID NO: 30536 - protein, 17 aa, synthetic construct
LFWYKQTASGEIVFLIR

SEQ ID NO: 30537 - protein, 17 aa, synthetic construct
MYWYKQSAEKPPELMFL

SEQ ID NO: 30538 - protein, 17 aa, synthetic construct
LFWYVRYPGEGLQLLLK

SEQ ID NO: 30539 - protein, 17 aa, synthetic construct
LYWYQQPRDQGPQLLVY

SEQ ID NO: 30540 - protein, 17 aa, synthetic construct
LFWYVQYPRQGLQLLLK

SEQ ID NO: 30541 - protein, 17 aa, synthetic construct
LYWYQQPRDQGPQLLVY

SEQ ID NO: 30542 - protein, 17 aa, synthetic construct
VQWFQQNSRGSLINLFY

SEQ ID NO: 30543 - protein, 17 aa, synthetic construct
LYWYQQPRDQGPQLLVY

SEQ ID NO: 30544 - protein, 17 aa, synthetic construct
IYWYRQVPHQGPQFIIQ

SEQ ID NO: 30545 - protein, 17 aa, synthetic construct
MYWYRQSAKKPLEFMFS

SEQ ID NO: 30546 - protein, 17 aa, synthetic construct
LFWYVRYPGEGLQLLLK

SEQ ID NO: 30547 - protein, 17 aa, synthetic construct
MYWYRQSAKKPLEFMFS

SEQ ID NO: 30548 - protein, 17 aa, synthetic construct
VQWFRKNSRGSLINLFY

SEQ ID NO: 30549 - protein, 17 aa, synthetic construct
MYWYKQDSKKLLKIMFS

SEQ ID NO: 30550 - protein, 17 aa, synthetic construct
FPWYKQEAGKSLHFVID

SEQ ID NO: 30551 - protein, 17 aa, synthetic construct
MYWYKQDSKKLLKIMFS

SEQ ID NO: 30552 - protein, 17 aa, synthetic construct
MQWFYQRPGGSLVSLFY

SEQ ID NO: 30553 - protein, 17 aa, synthetic construct
MYWYKQDSKKLLKIMFS

SEQ ID NO: 30554 - protein, 17 aa, synthetic construct
MQWFYQRPEGSLVSLFY

SEQ ID NO: 30555 - protein, 17 aa, synthetic construct
MYWYRQDTGHGLRLIHY

SEQ ID NO: 30556 - protein, 17 aa, synthetic construct
FPWYKQEPGENPKLIID

SEQ ID NO: 30557 - protein, 17 aa, synthetic construct
MYWYRQDTGHGLRLIHY

SEQ ID NO: 30558 - protein, 17 aa, synthetic construct
LFWYKQTASGEIVFLIR

SEQ ID NO: 30559 - protein, 17 aa, synthetic construct
MYWYRQDTGHGLRLIHY

SEQ ID NO: 30560 - protein, 17 aa, synthetic construct
LFWYVQYSGEGPQLLLQ

SEQ ID NO: 30561 - protein, 17 aa, synthetic construct
MYWYRQDTGHGLRLIHY

SEQ ID NO: 30562 - protein, 17 aa, synthetic construct
LFWYVRYPGEGLQLLLK

SEQ ID NO: 30563 - protein, 17 aa, synthetic construct
MYWYRQDTGHGLRLIHY

SEQ ID NO: 30564 - protein, 17 aa, synthetic construct
IYWYRQVPHQGPQFIIQ

SEQ ID NO: 30565 - protein, 17 aa, synthetic construct
MYWYRQDTGHGLRLIHY

SEQ ID NO: 30566 - protein, 17 aa, synthetic construct
LFWYVQYPRQGLQLLLK

SEQ ID NO: 30567 - protein, 17 aa, synthetic construct
MYWYRQDTGHGLRLIHY

SEQ ID NO: 30568 - protein, 17 aa, synthetic construct
IWWYQQHPGKGPEALIS

SEQ ID NO: 30569 - protein, 17 aa, synthetic construct
MYWYRQDTGHGLRLIHY

SEQ ID NO: 30570 - protein, 17 aa, synthetic construct
FPWYQQFPGEGPALLIA

SEQ ID NO: 30571 - protein, 17 aa, synthetic construct
MYWYRQDTGHGLRLIHY

SEQ ID NO: 30572 - protein, 17 aa, synthetic construct
FPWYKQEPGENPKLIID

SEQ ID NO: 30573 - protein, 17 aa, synthetic construct
MYWYRQDTGHGLRLIHY

SEQ ID NO: 30574 - protein, 17 aa, synthetic construct
LFWYKQTASGEIVFLIR

SEQ ID NO: 30575 - protein, 17 aa, synthetic construct
MYWYRQDTGHGLRLIHY

SEQ ID NO: 30576 - protein, 17 aa, synthetic construct
FPWYQQFPGEGPALLIS

SEQ ID NO: 30577 - protein, 17 aa, synthetic construct
MYWYRQDTGHGLRLIHY

SEQ ID NO: 30578 - protein, 17 aa, synthetic construct
LFWYKQTASGEIVFLIR

SEQ ID NO: 30579 - protein, 17 aa, synthetic construct
MYWYRQDTGHGLRLIHY

SEQ ID NO: 30580 - protein, 17 aa, synthetic construct
LFWYVQHLNEAPKLLLK

SEQ ID NO: 30581 - protein, 17 aa, synthetic construct
MYWYQKKPNQAPKLLLF

SEQ ID NO: 30582 - protein, 17 aa, synthetic construct
FWWYRQHSGEGPKALMS

SEQ ID NO: 30583 - protein, 17 aa, synthetic construct
LYWYWQATGGTLQQLFY

SEQ ID NO: 30584 - protein, 17 aa, synthetic construct
LFWYKQTASGEIVFLIR

SEQ ID NO: 30585 - protein, 17 aa, synthetic construct
LYWYWQATGGTLQQLFY

SEQ ID NO: 30586 - protein, 17 aa, synthetic construct
LFWYVQYPRQGLQLLLK

SEQ ID NO: 30587 - protein, 17 aa, synthetic construct
MYWYRQDSGKGLRLIYY

SEQ ID NO: 30588 - protein, 17 aa, synthetic construct
LFWYVRYPGEGLQLLLK

SEQ ID NO: 30589 - protein, 17 aa, synthetic construct
MYWYRQDSGKGLRLIYY

SEQ ID NO: 30590 - protein, 17 aa, synthetic construct
LFWYVQYPGQSLQFLLK

SEQ ID NO: 30591 - protein, 17 aa, synthetic construct
MYWYRQDSGKGLRLIYY

SEQ ID NO: 30592 - protein, 17 aa, synthetic construct
LFWYKQTASGEIVFLIR

SEQ ID NO: 30593 - protein, 17 aa, synthetic construct
MYWYRQDSGKGLRLIYY

SEQ ID NO: 30594 - protein, 17 aa, synthetic construct
LFWYVQYPGEGPQLLFR

SEQ ID NO: 30595 - protein, 17 aa, synthetic construct
MYWYRQDSGKGLRLIYY

SEQ ID NO: 30596 - protein, 17 aa, synthetic construct
LFWYVRYPGEGLQLLLK

SEQ ID NO: 30597 - protein, 17 aa, synthetic construct
MYWYRQDSGKGLRLIYY

SEQ ID NO: 30598 - protein, 17 aa, synthetic construct
FAWYRQHSGKAPKALMS

SEQ ID NO: 30599 - protein, 17 aa, synthetic construct
MSWYQQDLQKQLQWLFT

SEQ ID NO: 30600 - protein, 17 aa, synthetic construct
LQWYRQKSGEGPAQLIL

SEQ ID NO: 30601 - protein, 17 aa, synthetic construct
MSWYQQDLQKQLQWLFT

SEQ ID NO: 30602 - protein, 17 aa, synthetic construct
FPWYKQEPGKRLQFIID

SEQ ID NO: 30603 - protein, 17 aa, synthetic construct
MSWYQQDLQKQLQWLFT

SEQ ID NO: 30604 - protein, 17 aa, synthetic construct
FPWYKQEAGKSLHFVID

SEQ ID NO: 30605 - protein, 17 aa, synthetic construct
MSWYQQDLQKQLQWLFT

SEQ ID NO: 30606 - protein, 17 aa, synthetic construct
LFWYVHYLNESPRLLLK

SEQ ID NO: 30607 - protein, 17 aa, synthetic construct
MSWYQQDLQKQLQWLFT

SEQ ID NO: 30608 - protein, 17 aa, synthetic construct
LFWYVQYPGEGPQLLFR

SEQ ID NO: 30609 - DNA, 51 bp, synthetic construct; identical to SEQ ID NO: 7519
  source 1..51: mol_type = other DNA

SEQ ID NO: 30610 - DNA, 51 bp, synthetic construct; identical to SEQ ID NO: 7634
  source 1..51: mol_type = other DNA

SEQ ID NO: 30611 - DNA, 51 bp, synthetic construct; identical to SEQ ID NO: 7447
  source 1..51: mol_type = other DNA

SEQ ID NO: 30612 - DNA, 51 bp, synthetic construct; identical to SEQ ID NO: 7580
  source 1..51: mol_type = other DNA

SEQ ID NO: 30613 - DNA, 51 bp, synthetic construct; identical to SEQ ID NO: 7519
  source 1..51: mol_type = other DNA

SEQ ID NO: 30614 - DNA, 51 bp, synthetic construct; identical to SEQ ID NO: 7474
  source 1..51: mol_type = other DNA

SEQ ID NO: 30615 - DNA, 51 bp, synthetic construct; identical to SEQ ID NO: 7423
  source 1..51: mol_type = other DNA

SEQ ID NO: 30616 - DNA, 51 bp, synthetic construct; identical to SEQ ID NO: 7468
  source 1..51: mol_type = other DNA

SEQ ID NO: 30617 - DNA, 51 bp, synthetic construct; identical to SEQ ID NO: 7423
  source 1..51: mol_type = other DNA

SEQ ID NO: 30618 - DNA, 51 bp, synthetic construct; identical to SEQ ID NO: 7444
  source 1..51: mol_type = other DNA

SEQ ID NO: 30619 - DNA, 51 bp, synthetic construct; identical to SEQ ID NO: 7423
  source 1..51: mol_type = other DNA

SEQ ID NO: 30620 - DNA, 51 bp, synthetic construct; identical to SEQ ID NO: 7534
  source 1..51: mol_type = other DNA

SEQ ID NO: 30621 - DNA, 51 bp, synthetic construct; identical to SEQ ID NO: 7447
  source 1..51: mol_type = other DNA

SEQ ID NO: 30622 - DNA, 51 bp, synthetic construct; identical to SEQ ID NO: 7634
  source 1..51: mol_type = other DNA

SEQ ID NO: 30623 - DNA, 51 bp, synthetic construct; identical to SEQ ID NO: 7515
  source 1..51: mol_type = other DNA

SEQ ID NO: 30624 - DNA, 51 bp, synthetic construct; identical to SEQ ID NO: 7580
  source 1..51: mol_type = other DNA

SEQ ID NO: 30625 - DNA, 51 bp, synthetic construct; identical to SEQ ID NO: 7515
  source 1..51: mol_type = other DNA

SEQ ID NO: 30626 - DNA, 51 bp, synthetic construct; identical to SEQ ID NO: 7634
  source 1..51: mol_type = other DNA

SEQ ID NO: 30627 - DNA, 51 bp, synthetic construct; identical to SEQ ID NO: 7515
  source 1..51: mol_type = other DNA

SEQ ID NO: 30628 - DNA, 51 bp, synthetic construct; identical to SEQ ID NO: 7438
  source 1..51: mol_type = other DNA

SEQ ID NO: 30629 - DNA, 51 bp, synthetic construct; identical to SEQ ID NO: 7515
  source 1..51: mol_type = other DNA

SEQ ID NO: 30630 - DNA, 51 bp, synthetic construct; identical to SEQ ID NO: 7634
  source 1..51: mol_type = other DNA

SEQ ID NO: 30631 - DNA, 51 bp, synthetic construct; identical to SEQ ID NO: 7515
  source 1..51: mol_type = other DNA

SEQ ID NO: 30632 - DNA, 51 bp, synthetic construct; identical to SEQ ID NO: 7426
  source 1..51: mol_type = other DNA

SEQ ID NO: 30633 - DNA, 51 bp, synthetic construct; identical to SEQ ID NO: 7515
  source 1..51: mol_type = other DNA

SEQ ID NO: 30634 - DNA, 51 bp, synthetic construct; identical to SEQ ID NO: 7480
  source 1..51: mol_type = other DNA

SEQ ID NO: 30635 - DNA, 51 bp, synthetic construct; identical to SEQ ID NO: 7421
  source 1..51: mol_type = other DNA

SEQ ID NO: 30636 - DNA, 51 bp, synthetic construct; identical to SEQ ID NO: 7432
  source 1..51: mol_type = other DNA

SEQ ID NO: 30637 - DNA, 51 bp, synthetic construct; identical to SEQ ID NO: 7421
  source 1..51: mol_type = other DNA

SEQ ID NO: 30638 - DNA, 51 bp, synthetic construct; identical to SEQ ID NO: 7706
  source 1..51: mol_type = other DNA

SEQ ID NO: 30639 - DNA, 51 bp, synthetic construct; identical to SEQ ID NO: 7421
  source 1..51: mol_type = other DNA

SEQ ID NO: 30640 - DNA, 51 bp, synthetic construct; identical to SEQ ID NO: 7526
  source 1..51: mol_type = other DNA

SEQ ID NO: 30641 - DNA, 51 bp, synthetic construct; identical to SEQ ID NO: 7435
  source 1..51: mol_type = other DNA

SEQ ID NO: 30642 - DNA, 51 bp, synthetic construct; identical to SEQ ID NO: 7480
  source 1..51: mol_type = other DNA

SEQ ID NO: 30643 - DNA, 51 bp, synthetic construct; identical to SEQ ID NO: 7435
  source 1..51: mol_type = other DNA

SEQ ID NO: 30644 - DNA, 51 bp, synthetic construct; identical to SEQ ID NO: 7532
  source 1..51: mol_type = other DNA

SEQ ID NO: 30645 - DNA, 51 bp, synthetic construct; identical to SEQ ID NO: 7519
  source 1..51: mol_type = other DNA

SEQ ID NO: 30646 - DNA, 51 bp, synthetic construct; identical to SEQ ID NO: 7474
  source 1..51: mol_type = other DNA

SEQ ID NO: 30647 - DNA, 51 bp, synthetic construct; identical to SEQ ID NO: 7519
  source 1..51: mol_type = other DNA

SEQ ID NO: 30648 - DNA, 51 bp, synthetic construct; identical to SEQ ID NO: 7430
  source 1..51: mol_type = other DNA

SEQ ID NO: 30649 - DNA, 51 bp, synthetic construct; identical to SEQ ID NO: 7519
  source 1..51: mol_type = other DNA

SEQ ID NO: 30650 - DNA, 51 bp, synthetic construct; identical to SEQ ID NO: 7676
  source 1..51: mol_type = other DNA

SEQ ID NO: 30651 - DNA, 51 bp, synthetic construct; identical to SEQ ID NO: 7423
  source 1..51: mol_type = other DNA

SEQ ID NO: 30652 - DNA, 51 bp, synthetic construct; identical to SEQ ID NO: 7468
  source 1..51: mol_type = other DNA

SEQ ID NO: 30653 - DNA, 51 bp, synthetic construct; identical to SEQ ID NO: 7423
  source 1..51: mol_type = other DNA

SEQ ID NO: 30654 - DNA, 51 bp, synthetic construct; identical to SEQ ID NO: 7426
  source 1..51: mol_type = other DNA

SEQ ID NO: 30655 - DNA, 51 bp, synthetic construct; identical to SEQ ID NO: 7457
  source 1..51: mol_type = other DNA

SEQ ID NO: 30656 - DNA, 51 bp, synthetic construct; identical to SEQ ID NO: 7876
  source 1..51: mol_type = other DNA

SEQ ID NO: 30657 - DNA, 51 bp, synthetic construct; identical to SEQ ID NO: 7457
  source 1..51: mol_type = other DNA

SEQ ID NO: 30658 - DNA, 51 bp, synthetic construct; identical to SEQ ID NO: 7480
  source 1..51: mol_type = other DNA

SEQ ID NO: 30659 - DNA, 51 bp, synthetic construct; identical to SEQ ID NO: 7457
  source 1..51: mol_type = other DNA

SEQ ID NO: 30660 - DNA, 51 bp, synthetic construct; identical to SEQ ID NO: 7526
  source 1..51: mol_type = other DNA

SEQ ID NO: 30661 - DNA, 51 bp, synthetic construct; identical to SEQ ID NO: 7457
  source 1..51: mol_type = other DNA

SEQ ID NO: 30662 - DNA, 51 bp, synthetic construct; identical to SEQ ID NO: 7432
  source 1..51: mol_type = other DNA

SEQ ID NO: 30663 - DNA, 51 bp, synthetic construct; identical to SEQ ID NO: 7457
  source 1..51: mol_type = other DNA

SEQ ID NO: 30664 - DNA, 51 bp, synthetic construct; identical to SEQ ID NO: 7516
  source 1..51: mol_type = other DNA

SEQ ID NO: 30665 - DNA, 51 bp, synthetic construct; identical to SEQ ID NO: 7457
  source 1..51: mol_type = other DNA

SEQ ID NO: 30666 - DNA, 51 bp, synthetic construct; identical to SEQ ID NO: 7504
  source 1..51: mol_type = other DNA

SEQ ID NO: 30667 - DNA, 51 bp, synthetic construct; identical to SEQ ID NO: 7457
  source 1..51: mol_type = other DNA

SEQ ID NO: 30668 - DNA, 51 bp, synthetic construct; identical to SEQ ID NO: 7468
  source 1..51: mol_type = other DNA

SEQ ID NO: 30669 - DNA, 51 bp, synthetic construct; identical to SEQ ID NO: 7457
  source 1..51: mol_type = other DNA

SEQ ID NO: 30670 - DNA, 51 bp, synthetic construct; identical to SEQ ID NO: 7426
  source 1..51: mol_type = other DNA

SEQ ID NO: 30671 - DNA, 51 bp, synthetic construct; identical to SEQ ID NO: 7427
  source 1..51: mol_type = other DNA

SEQ ID NO: 30672 - DNA, 51 bp, synthetic construct; identical to SEQ ID NO: 7488
  source 1..51: mol_type = other DNA

SEQ ID NO: 30673 - DNA, 51 bp, synthetic construct; identical to SEQ ID NO: 7427
  source 1..51: mol_type = other DNA

SEQ ID NO: 30674 - DNA, 51 bp, synthetic construct; identical to SEQ ID NO: 7426
  source 1..51: mol_type = other DNA

SEQ ID NO: 30675 - DNA, 51 bp, synthetic construct; identical to SEQ ID NO: 7427
  source 1..51: mol_type = other DNA

SEQ ID NO: 30676 - DNA, 51 bp, synthetic construct; identical to SEQ ID NO: 7428
  source 1..51: mol_type = other DNA

SEQ ID NO: 30677 - DNA, 51 bp, synthetic construct; identical to SEQ ID NO: 7719
  source 1..51: mol_type = other DNA

SEQ ID NO: 30678 - DNA, 51 bp, synthetic construct; identical to SEQ ID NO: 7422
  source 1..51: mol_type = other DNA

SEQ ID NO: 30679 - DNA, 51 bp, synthetic construct; identical to SEQ ID NO: 7455
  source 1..51: mol_type = other DNA

SEQ ID NO: 30680 - DNA, 51 bp, synthetic construct; identical to SEQ ID NO: 7426
  source 1..51: mol_type = other DNA

SEQ ID NO: 30681 - DNA, 51 bp, synthetic construct; identical to SEQ ID NO: 7455
  source 1..51: mol_type = other DNA

SEQ ID NO: 30682 - DNA, 51 bp, synthetic construct; identical to SEQ ID NO: 7432
  source 1..51: mol_type = other DNA

SEQ ID NO: 30683 - DNA, 51 bp, synthetic construct; identical to SEQ ID NO: 7447
  source 1..51: mol_type = other DNA

SEQ ID NO: 30684 - DNA, 51 bp, synthetic construct; identical to SEQ ID NO: 7480
  source 1..51: mol_type = other DNA

SEQ ID NO: 30685 - DNA, 51 bp, synthetic construct; identical to SEQ ID NO: 7447
  source 1..51: mol_type = other DNA

SEQ ID NO: 30686 - DNA, 51 bp, synthetic construct; identical to SEQ ID NO: 7700
  source 1..51: mol_type = other DNA

SEQ ID NO: 30687 - DNA, 51 bp, synthetic construct; identical to SEQ ID NO: 7447
  source 1..51: mol_type = other DNA

SEQ ID NO: 30688 - DNA, 51 bp, synthetic construct; identical to SEQ ID NO: 7426
  source 1..51: mol_type = other DNA

SEQ ID NO: 30689 - DNA, 51 bp, synthetic construct; identical to SEQ ID NO: 7447
  source 1..51: mol_type = other DNA

SEQ ID NO: 30690 - DNA, 51 bp, synthetic construct; identical to SEQ ID NO: 7434
  source 1..51: mol_type = other DNA

SEQ ID NO: 30691 - DNA, 51 bp, synthetic construct; identical to SEQ ID NO: 7447
  source 1..51: mol_type = other DNA

SEQ ID NO: 30692 - DNA, 51 bp, synthetic construct; identical to SEQ ID NO: 7480
  source 1..51: mol_type = other DNA

SEQ ID NO: 30693 - DNA, 51 bp, synthetic construct; identical to SEQ ID NO: 7447
  source 1..51: mol_type = other DNA

SEQ ID NO: 30694 - DNA, 51 bp, synthetic construct; identical to SEQ ID NO: 7634
  source 1..51: mol_type = other DNA

SEQ ID NO: 30695 - DNA, 51 bp, synthetic construct; identical to SEQ ID NO: 7443
  source 1..51: mol_type = other DNA

SEQ ID NO: 30696 - DNA, 51 bp, synthetic construct; identical to SEQ ID NO: 7444
  source 1..51: mol_type = other DNA

SEQ ID NO: 30697 - DNA, 51 bp, synthetic construct; identical to SEQ ID NO: 7443
  source 1..51: mol_type = other DNA

SEQ ID NO: 30698 - DNA, 51 bp, synthetic construct; identical to SEQ ID NO: 7580
  source 1..51: mol_type = other DNA

SEQ ID NO: 30699 - DNA, 51 bp, synthetic construct; identical to SEQ ID NO: 7443
  source 1..51: mol_type = other DNA

SEQ ID NO: 30700 - DNA, 51 bp, synthetic construct; identical to SEQ ID NO: 7474
  source 1..51: mol_type = other DNA

SEQ ID NO: 30701 - DNA, 51 bp, synthetic construct; identical to SEQ ID NO: 7443
  source 1..51: mol_type = other DNA

SEQ ID NO: 30702 - DNA, 51 bp, synthetic construct; identical to SEQ ID NO: 8310
  source 1..51: mol_type = other DNA

SEQ ID NO: 30703 - DNA, 51 bp, synthetic construct; identical to SEQ ID NO: 7443
  source 1..51: mol_type = other DNA

SEQ ID NO: 30704 - DNA, 51 bp, synthetic construct; identical to SEQ ID NO: 7434
  source 1..51: mol_type = other DNA

SEQ ID NO: 30705 - protein, 6 aa, synthetic construct
YNNKQL

SEQ ID NO: 30706 - protein, 6 aa, synthetic construct
IFSNGE

SEQ ID NO: 30707 - protein, 6 aa, synthetic construct
SITEND

SEQ ID NO: 30708 - protein, 7 aa, synthetic construct
IRSNMER

SEQ ID NO: 30709 - protein, 6 aa, synthetic construct
YNNKQL

SEQ ID NO: 30710 - protein, 7 aa, synthetic construct
IRSNVDR

SEQ ID NO: 30711 - protein, 6 aa, synthetic construct
SYGAGS

SEQ ID NO: 30712 - protein, 7 aa, synthetic construct
IRSNMER

SEQ ID NO: 30713 - protein, 6 aa, synthetic construct
SYGAGS

SEQ ID NO: 30714 - protein, 7 aa, synthetic construct
IRSNERE

SEQ ID NO: 30715 - protein, 6 aa, synthetic construct
SYGAGS

SEQ ID NO: 30716 - protein, 7 aa, synthetic construct
ASRDKEK

SEQ ID NO: 30717 - protein, 6 aa, synthetic construct
SITEND

SEQ ID NO: 30718 - protein, 6 aa, synthetic construct
IFSNGE

SEQ ID NO: 30719 - protein, 6 aa, synthetic construct
YNLKQL

SEQ ID NO: 30720 - protein, 7 aa, synthetic construct
IRSNMER

SEQ ID NO: 30721 - protein, 6 aa, synthetic construct
YNLKQL

SEQ ID NO: 30722 - protein, 6 aa, synthetic construct
IFSNGE

SEQ ID NO: 30723 - protein, 6 aa, synthetic construct
YNLKQL

SEQ ID NO: 30724 - protein, 5 aa, synthetic construct
LASGT

SEQ ID NO: 30725 - protein, 6 aa, synthetic construct
YNLKQL

SEQ ID NO: 30726 - protein, 6 aa, synthetic construct
IFSNGE

SEQ ID NO: 30727 - protein, 6 aa, synthetic construct
YNLKQL

SEQ ID NO: 30728 - protein, 8 aa, synthetic construct
QDSYKKEN

SEQ ID NO: 30729 - protein, 6 aa, synthetic construct
YNLKQL

SEQ ID NO: 30730 - protein, 7 aa, synthetic construct
VITAGQK

SEQ ID NO: 30731 - protein, 6 aa, synthetic construct
FRDEAV

SEQ ID NO: 30732 - protein, 8 aa, synthetic construct
YYSGDPVV

SEQ ID NO: 30733 - protein, 6 aa, synthetic construct
FRDEAV

SEQ ID NO: 30734 - protein, 5 aa, synthetic construct
LASGT

SEQ ID NO: 30735 - protein, 6 aa, synthetic construct
FRDEAV

SEQ ID NO: 30736 - protein, 7 aa, synthetic construct
GYKDYVV

SEQ ID NO: 30737 - protein, 6 aa, synthetic construct
YSYQKL

SEQ ID NO: 30738 - protein, 7 aa, synthetic construct
VITAGQK

SEQ ID NO: 30739 - protein, 6 aa, synthetic construct
YSYQKL

SEQ ID NO: 30740 - protein, 5 aa, synthetic construct
LASGT

SEQ ID NO: 30741 - protein, 6 aa, synthetic construct
YNNKQL

SEQ ID NO: 30742 - protein, 7 aa, synthetic construct
IRSNVDR

SEQ ID NO: 30743 - protein, 6 aa, synthetic construct
YNNKQL

SEQ ID NO: 30744 - protein, 5 aa, synthetic construct
NPSGT

SEQ ID NO: 30745 - protein, 6 aa, synthetic construct
YNNKQL

SEQ ID NO: 30746 - protein, 5 aa, synthetic construct
NPSGT

SEQ ID NO: 30747 - protein, 6 aa, synthetic construct
SYGAGS

SEQ ID NO: 30748 - protein, 7 aa, synthetic construct
IRSNMER

SEQ ID NO: 30749 - protein, 6 aa, synthetic construct
SYGAGS

SEQ ID NO: 30750 - protein, 8 aa, synthetic construct
QDSYKKEN

SEQ ID NO: 30751 - protein, 6 aa, synthetic construct
SYGAGN

SEQ ID NO: 30752 - protein, 7 aa, synthetic construct
VTTANNK

SEQ ID NO: 30753 - protein, 6 aa, synthetic construct
SYGAGN

SEQ ID NO: 30754 - protein, 7 aa, synthetic construct
VITAGQK

SEQ ID NO: 30755 - protein, 6 aa, synthetic construct
SYGAGN

SEQ ID NO: 30756 - protein, 7 aa, synthetic construct
GYKDYVV

SEQ ID NO: 30757 - protein, 6 aa, synthetic construct
SYGAGN

SEQ ID NO: 30758 - protein, 8 aa, synthetic construct
YYSGDPVV

SEQ ID NO: 30759 - protein, 6 aa, synthetic construct
SYGAGN

SEQ ID NO: 30760 - protein, 6 aa, synthetic construct
IFSNGN

SEQ ID NO: 30761 - protein, 6 aa, synthetic construct
SYGAGN

SEQ ID NO: 30762 - protein, 7 aa, synthetic construct
IRSVSDK

SEQ ID NO: 30763 - protein, 6 aa, synthetic construct
SYGAGN

SEQ ID NO: 30764 - protein, 7 aa, synthetic construct
IRSNMER

SEQ ID NO: 30765 - protein, 6 aa, synthetic construct
SYGAGN

SEQ ID NO: 30766 - protein, 8 aa, synthetic construct
QDSYKKEN

SEQ ID NO: 30767 - protein, 6 aa, synthetic construct
SYVADS

SEQ ID NO: 30768 - protein, 7 aa, synthetic construct
IRSVSDK

SEQ ID NO: 30769 - protein, 6 aa, synthetic construct
SYVADS

SEQ ID NO: 30770 - protein, 8 aa, synthetic construct
QDSYKKEN

SEQ ID NO: 30771 - protein, 6 aa, synthetic construct
SYVADS

SEQ ID NO: 30772 - protein, 7 aa, synthetic construct
SSTDNKR

SEQ ID NO: 30773 - protein, 6 aa, synthetic construct
YYDKIL

SEQ ID NO: 30774 - protein, 6 aa, synthetic construct
IFSDGD

SEQ ID NO: 30775 - protein, 5 aa, synthetic construct
SITVG

SEQ ID NO: 30776 - protein, 8 aa, synthetic construct
QDSYKKEN

SEQ ID NO: 30777 - protein, 5 aa, synthetic construct
SITVG

SEQ ID NO: 30778 - protein, 8 aa, synthetic construct
YYPGDPVV

SEQ ID NO: 30779 - protein, 6 aa, synthetic construct
SITEND

SEQ ID NO: 30780 - protein, 7 aa, synthetic construct
VITAGQK

SEQ ID NO: 30781 - protein, 6 aa, synthetic construct
SITEND

SEQ ID NO: 30782 - protein, 8 aa, synthetic construct
YITGDTVV

SEQ ID NO: 30783 - protein, 6 aa, synthetic construct
SITEND

SEQ ID NO: 30784 - protein, 8 aa, synthetic construct
QDSYKKEN

SEQ ID NO: 30785 - protein, 6 aa, synthetic construct
SITEND

SEQ ID NO: 30786 - protein, 7 aa, synthetic construct
ASRDKEK

SEQ ID NO: 30787 - protein, 6 aa, synthetic construct
SITEND

SEQ ID NO: 30788 - protein, 7 aa, synthetic construct
VITAGQK

SEQ ID NO: 30789 - protein, 6 aa, synthetic construct
SITEND

SEQ ID NO: 30790 - protein, 6 aa, synthetic construct
IFSNGE

SEQ ID NO: 30791 - protein, 6 aa, synthetic construct
LRSPGD

SEQ ID NO: 30792 - protein, 7 aa, synthetic construct
IRSNERE

SEQ ID NO: 30793 - protein, 6 aa, synthetic construct
LRSPGD

SEQ ID NO: 30794 - protein, 7 aa, synthetic construct
IRSNMER

SEQ ID NO: 30795 - protein, 6 aa, synthetic construct
LRSPGD

SEQ ID NO: 30796 - protein, 7 aa, synthetic construct
IRSNVDR

SEQ ID NO: 30797 - protein, 6 aa, synthetic construct
LRSPGD

SEQ ID NO: 30798 - protein, 7 aa, synthetic construct
SSTDNKR

SEQ ID NO: 30799 - protein, 6 aa, synthetic construct
LRSPGD

SEQ ID NO: 30800 - protein, 7 aa, synthetic construct
ASRDKEK

SEQ ID NO: 30801 - DNA, 18 bp, synthetic construct
  source 1..18: mol_type = other DNA
tacaataataagcaactc

SEQ ID NO: 30802 - DNA, 18 bp, synthetic construct
  source 1..18: mol_type = other DNA
atcttctccaatggtgaa

SEQ ID NO: 30803 - DNA, 18 bp, synthetic construct
  source 1..18: mol_type = other DNA
tcaataactgaaaacgat

SEQ ID NO: 30804 - DNA, 21 bp, synthetic construct
  source 1..21: mol_type = other DNA
atccgttcaaatatggaaaga

SEQ ID NO: 30805 - DNA, 18 bp, synthetic construct
  source 1..18: mol_type = other DNA
tacaataataagcaactc

SEQ ID NO: 30806 - DNA, 21 bp, synthetic construct
  source 1..21: mol_type = other DNA
attcgttcaaatgtggacaga

SEQ ID NO: 30807 - DNA, 18 bp, synthetic construct
  source 1..18: mol_type = other DNA
tcatatggtgctggcagc

SEQ ID NO: 30808 - DNA, 21 bp, synthetic construct
  source 1..21: mol_type = other DNA
attcgttcaaatatggaaaga

SEQ ID NO: 30809 - DNA, 18 bp, synthetic construct
  source 1..18: mol_type = other DNA
tcatatggtgctggcagc

SEQ ID NO: 30810 - DNA, 21 bp, synthetic construct
  source 1..21: mol_type = other DNA
atacgttcaaatgagagagag

SEQ ID NO: 30811 - DNA, 18 bp, synthetic construct
  source 1..18: mol_type = other DNA
tcatatggtgctggcagc

SEQ ID NO: 30812 - DNA, 21 bp, synthetic construct
  source 1..21: mol_type = other DNA
gcctcaagggacaaagagaaa

SEQ ID NO: 30813 - DNA, 18 bp, synthetic construct
  source 1..18: mol_type = other DNA
tcaataactgaaaacgat

SEQ ID NO: 30814 - DNA, 18 bp, synthetic construct
  source 1..18: mol_type = other DNA
atcttctccaatggtgaa

SEQ ID NO: 30815 - DNA, 18 bp, synthetic construct
  source 1..18: mol_type = other DNA
tacaatcttaaacagttg

SEQ ID NO: 30816 - DNA, 21 bp, synthetic construct
  source 1..21: mol_type = other DNA
atccgttcaaatatggaaaga

SEQ ID NO: 30817 - DNA, 18 bp, synthetic construct
  source 1..18: mol_type = other DNA
tacaatcttaaacagttg

SEQ ID NO: 30818 - DNA, 18 bp, synthetic construct
  source 1..18: mol_type = other DNA
atcttctccaatggtgaa

SEQ ID NO: 30819 - DNA, 18 bp, synthetic construct
  source 1..18: mol_type = other DNA
tacaatcttaaacagttg

SEQ ID NO: 30820 - DNA, 15 bp, synthetic construct
  source 1..15: mol_type = other DNA
ttggcttcaggaaca

SEQ ID NO: 30821 - DNA, 18 bp, synthetic construct
  source 1..18: mol_type = other DNA
tacaatcttaaacagttg

SEQ ID NO: 30822 - DNA, 18 bp, synthetic construct
  source 1..18: mol_type = other DNA
atcttctccaatggtgaa

SEQ ID NO: 30823 - DNA, 18 bp, synthetic construct
  source 1..18: mol_type = other DNA
tacaatcttaaacagttg

SEQ ID NO: 30824 - DNA, 24 bp, synthetic construct
  source 1..24: mol_type = other DNA
caggactcttacaaaaaggaaaat

SEQ ID NO: 30825 - DNA, 18 bp, synthetic construct
  source 1..18: mol_type = other DNA
tacaatcttaaacagttg

SEQ ID NO: 30826 - DNA, 21 bp, synthetic construct
  source 1..21: mol_type = other DNA
gtcattacggctggccagaag

SEQ ID NO: 30827 - DNA, 18 bp, synthetic construct
  source 1..18: mol_type = other DNA
tttcgggatgaggctgtt

SEQ ID NO: 30828 - DNA, 24 bp, synthetic construct
  source 1..24: mol_type = other DNA
tactattccggagacccagtggtt

SEQ ID NO: 30829 - DNA, 18 bp, synthetic construct
  source 1..18: mol_type = other DNA
tttcgggatgaggctgtt

SEQ ID NO: 30830 - DNA, 15 bp, synthetic construct
  source 1..15: mol_type = other DNA
ttggcttcaggaaca

SEQ ID NO: 30831 - DNA, 18 bp, synthetic construct
  source 1..18: mol_type = other DNA
tttcgggatgaggctgtt

SEQ ID NO: 30832 - DNA, 21 bp, synthetic construct
  source 1..21: mol_type = other DNA
ggatataaggactatgtggta

SEQ ID NO: 30833 - DNA, 18 bp, synthetic construct
  source 1..18: mol_type = other DNA
tacagctatcaaaaactt

SEQ ID NO: 30834 - DNA, 21 bp, synthetic construct
  source 1..21: mol_type = other DNA
gtcattacggctggccagaag

SEQ ID NO: 30835 - DNA, 18 bp, synthetic construct
  source 1..18: mol_type = other DNA
tacagctatcaaaaactt

SEQ ID NO: 30836 - DNA, 15 bp, synthetic construct
  source 1..15: mol_type = other DNA
ttggcttcaggaaca

SEQ ID NO: 30837 - DNA, 18 bp, synthetic construct
  source 1..18: mol_type = other DNA
tacaataataagcaactc

SEQ ID NO: 30838 - DNA, 21 bp, synthetic construct
  source 1..21: mol_type = other DNA
attcgttcaaatgtggacaga

SEQ ID NO: 30839 - DNA, 18 bp, synthetic construct
  source 1..18: mol_type = other DNA
tacaataataagcaactc

SEQ ID NO: 30840 - DNA, 15 bp, synthetic construct
  source 1..15: mol_type = other DNA
aatccttctgggaca

SEQ ID NO: 30841 - DNA, 18 bp, synthetic construct
  source 1..18: mol_type = other DNA
tacaataataagcaactc

SEQ ID NO: 30842 - DNA, 15 bp, synthetic construct
  source 1..15: mol_type = other DNA
aatccttctgggaca

SEQ ID NO: 30843 - DNA, 18 bp, synthetic construct
  source 1..18: mol_type = other DNA
tcatatggtgctggcagc

SEQ ID NO: 30844 - DNA, 21 bp, synthetic construct
  source 1..21: mol_type = other DNA
attcgttcaaatatggaaaga

SEQ ID NO: 30845 - DNA, 18 bp, synthetic construct
  source 1..18: mol_type = other DNA
tcatatggtgctggcagc

SEQ ID NO: 30846 - DNA, 24 bp, synthetic construct
  source 1..24: mol_type = other DNA
caggactcttacaaaaaggaaaat

SEQ ID NO: 30847 - DNA, 18 bp, synthetic construct
  source 1..18: mol_type = other DNA
tcatatggtgctggcaac

SEQ ID NO: 30848 - DNA, 21 bp, synthetic construct
  source 1..21: mol_type = other DNA
gtcacaactgccaacaacaag

SEQ ID NO: 30849 - DNA, 18 bp, synthetic construct
  source 1..18: mol_type = other DNA
tcatatggtgctggcaac

SEQ ID NO: 30850 - DNA, 21 bp, synthetic construct
  source 1..21: mol_type = other DNA
gtcattacggctggccagaag

SEQ ID NO: 30851 - DNA, 18 bp, synthetic construct
  source 1..18: mol_type = other DNA
tcatatggtgctggcaac

SEQ ID NO: 30852 - DNA, 21 bp, synthetic construct
  source 1..21: mol_type = other DNA
ggatataaggactatgtggta

SEQ ID NO: 30853 - DNA, 18 bp, synthetic construct
  source 1..18: mol_type = other DNA
tcatatggtgctggcaac

SEQ ID NO: 30854 - DNA, 24 bp, synthetic construct
  source 1..24: mol_type = other DNA
tactattccggagacccagtggtt

SEQ ID NO: 30855 - DNA, 18 bp, synthetic construct
  source 1..18: mol_type = other DNA
tcatatggtgctggcaac

SEQ ID NO: 30856 - DNA, 18 bp, synthetic construct
  source 1..18: mol_type = other DNA
atattctctaatggcaac

SEQ ID NO: 30857 - DNA, 18 bp, synthetic construct
  source 1..18: mol_type = other DNA
tcatatggtgctggcaac

SEQ ID NO: 30858 - DNA, 21 bp, synthetic construct
  source 1..21: mol_type = other DNA
atacgttcagtgtccgataaa

SEQ ID NO: 30859 - DNA, 18 bp, synthetic construct
  source 1..18: mol_type = other DNA
tcatatggtgctggcaac

SEQ ID NO: 30860 - DNA, 21 bp, synthetic construct
  source 1..21: mol_type = other DNA
attcgttcaaatatggaaaga

SEQ ID NO: 30861 - DNA, 18 bp, synthetic construct
  source 1..18: mol_type = other DNA
tcatatggtgctggcaac

SEQ ID NO: 30862 - DNA, 24 bp, synthetic construct
  source 1..24: mol_type = other DNA
caggactcttacaaaaaggaaaat

SEQ ID NO: 30863 - DNA, 18 bp, synthetic construct
  source 1..18: mol_type = other DNA
tcatatgtcgctgacagc

SEQ ID NO: 30864 - DNA, 21 bp, synthetic construct
  source 1..21: mol_type = other DNA
atacgttcagtgtccgataaa

SEQ ID NO: 30865 - DNA, 18 bp, synthetic construct
  source 1..18: mol_type = other DNA
tcatatgtcgctgacagc

SEQ ID NO: 30866 - DNA, 24 bp, synthetic construct
  source 1..24: mol_type = other DNA
caggactcttacaaaaaggaaaat

SEQ ID NO: 30867 - DNA, 18 bp, synthetic construct
  source 1..18: mol_type = other DNA
tcatatgtcgctgacagc

SEQ ID NO: 30868 - DNA, 21 bp, synthetic construct
  source 1..21: mol_type = other DNA
agctccacagacaacaagagg

SEQ ID NO: 30869 - DNA, 18 bp, synthetic construct
  source 1..18: mol_type = other DNA
tactatgataagattttg

SEQ ID NO: 30870 - DNA, 18 bp, synthetic construct
  source 1..18: mol_type = other DNA
atcttctctgatggtgac

SEQ ID NO: 30871 - DNA, 15 bp, synthetic construct
  source 1..15: mol_type = other DNA
tctattactgttggc

SEQ ID NO: 30872 - DNA, 24 bp, synthetic construct
  source 1..24: mol_type = other DNA
caggactcttacaaaaaggaaaat

SEQ ID NO: 30873 - DNA, 15 bp, synthetic construct
  source 1..15: mol_type = other DNA
tctattactgttggc

SEQ ID NO: 30874 - DNA, 24 bp, synthetic construct
  source 1..24: mol_type = other DNA
tactatccaggagacccagtggtt

SEQ ID NO: 30875 - DNA, 18 bp, synthetic construct
  source 1..18: mol_type = other DNA
tcaataactgaaaacgat

SEQ ID NO: 30876 - DNA, 21 bp, synthetic construct
  source 1..21: mol_type = other DNA
gtcattacggctggccagaag

SEQ ID NO: 30877 - DNA, 18 bp, synthetic construct
  source 1..18: mol_type = other DNA
tcaataactgaaaacgat

SEQ ID NO: 30878 - DNA, 24 bp, synthetic construct
  source 1..24: mol_type = other DNA
tacatcacaggagacaccgttgtt

SEQ ID NO: 30879 - DNA, 18 bp, synthetic construct
  source 1..18: mol_type = other DNA
tcaataactgaaaacgat

SEQ ID NO: 30880 - DNA, 24 bp, synthetic construct
  source 1..24: mol_type = other DNA
caggactcttacaaaaaggaaaat

SEQ ID NO: 30881 - DNA, 18 bp, synthetic construct
  source 1..18: mol_type = other DNA
tcaataactgaaaacgat

SEQ ID NO: 30882 - DNA, 21 bp, synthetic construct
  source 1..21: mol_type = other DNA
gcctcaagggacaaagagaaa

SEQ ID NO: 30883 - DNA, 18 bp, synthetic construct
  source 1..18: mol_type = other DNA
tcaataactgaaaacgat

SEQ ID NO: 30884 - DNA, 21 bp, synthetic construct
  source 1..21: mol_type = other DNA
gtcattacggctggccagaag

SEQ ID NO: 30885 - DNA, 18 bp, synthetic construct
  source 1..18: mol_type = other DNA
tcaataactgaaaacgat

SEQ ID NO: 30886 - DNA, 18 bp, synthetic construct
  source 1..18: mol_type = other DNA
atcttctccaatggtgaa

SEQ ID NO: 30887 - DNA, 18 bp, synthetic construct
  source 1..18: mol_type = other DNA
ctgcggagtcctggggac

SEQ ID NO: 30888 - DNA, 21 bp, synthetic construct
  source 1..21: mol_type = other DNA
atacgttcaaatgagagagag

SEQ ID NO: 30889 - DNA, 18 bp, synthetic construct
  source 1..18: mol_type = other DNA
ctgcggagtcctggggac

SEQ ID NO: 30890 - DNA, 21 bp, synthetic construct
  source 1..21: mol_type = other DNA
atccgttcaaatatggaaaga

SEQ ID NO: 30891 - DNA, 18 bp, synthetic construct
  source 1..18: mol_type = other DNA
ctgcggagtcctggggac

SEQ ID NO: 30892 - DNA, 21 bp, synthetic construct
  source 1..21: mol_type = other DNA
attcgttcaaatgtggacaga

SEQ ID NO: 30893 - DNA, 18 bp, synthetic construct
  source 1..18: mol_type = other DNA
ctgcggagtcctggggac

SEQ ID NO: 30894 - DNA, 21 bp, synthetic construct
  source 1..21: mol_type = other DNA
agctccacagacaacaagagg

SEQ ID NO: 30895 - DNA, 18 bp, synthetic construct
  source 1..18: mol_type = other DNA
ctgcggagtcctggggac

SEQ ID NO: 30896 - DNA, 21 bp, synthetic construct
  source 1..21: mol_type = other DNA
gcctcaagggacaaagagaaa

SEQ ID NO: 30897 - protein, 36 aa, synthetic construct; identical to SEQ ID NO: 11971

SEQ ID NO: 30898 - protein, 33 aa, synthetic construct; identical to SEQ ID NO: 11948

SEQ ID NO: 30899 - protein, 36 aa, synthetic construct; identical to SEQ ID NO: 11899

SEQ ID NO: 30900 - protein, 33 aa, synthetic construct; identical to SEQ ID NO: 24636

SEQ ID NO: 30901 - protein, 36 aa, synthetic construct; identical to SEQ ID NO: 11971

SEQ ID NO: 30902 - protein, 33 aa, synthetic construct; identical to SEQ ID NO: 12238

SEQ ID NO: 30903 - protein, 36 aa, synthetic construct; identical to SEQ ID NO: 11875

SEQ ID NO: 30904 - protein, 33 aa, synthetic construct; identical to SEQ ID NO: 12042

SEQ ID NO: 30905 - protein, 36 aa, synthetic construct; identical to SEQ ID NO: 11875

SEQ ID NO: 30906 - protein, 33 aa, synthetic construct; identical to SEQ ID NO: 11896

SEQ ID NO: 30907 - protein, 36 aa, synthetic construct; identical to SEQ ID NO: 11875

SEQ ID NO: 30908 - protein, 33 aa, synthetic construct; identical to SEQ ID NO: 11886

SEQ ID NO: 30909 - protein, 36 aa, synthetic construct; identical to SEQ ID NO: 11899

SEQ ID NO: 30910 - protein, 33 aa, synthetic construct; identical to SEQ ID NO: 11948

SEQ ID NO: 30911 - protein, 36 aa, synthetic construct; identical to SEQ ID NO: 11967

SEQ ID NO: 30912 - protein, 33 aa, synthetic construct; identical to SEQ ID NO: 12032

SEQ ID NO: 30913 - protein, 36 aa, synthetic construct; identical to SEQ ID NO: 11967

SEQ ID NO: 30914 - protein, 33 aa, synthetic construct; identical to SEQ ID NO: 11948

SEQ ID NO: 30915 - protein, 36 aa, synthetic construct; identical to SEQ ID NO: 11967

SEQ ID NO: 30916 - protein, 34 aa, synthetic construct; identical to SEQ ID NO: 11890

SEQ ID NO: 30917 - protein, 36 aa, synthetic construct; identical to SEQ ID NO: 11967

SEQ ID NO: 30918 - protein, 33 aa, synthetic construct; identical to SEQ ID NO: 11948

SEQ ID NO: 30919 - protein, 36 aa, synthetic construct; identical to SEQ ID NO: 11967

SEQ ID NO: 30920 - protein, 33 aa, synthetic construct; identical to SEQ ID NO: 11916

SEQ ID NO: 30921 - protein, 36 aa, synthetic construct; identical to SEQ ID NO: 11967

SEQ ID NO: 30922 - protein, 33 aa, synthetic construct; identical to SEQ ID NO: 12094

SEQ ID NO: 30923 - protein, 37 aa, synthetic construct; identical to SEQ ID NO: 11873

SEQ ID NO: 30924 - protein, 33 aa, synthetic construct; identical to SEQ ID NO: 11892

SEQ ID NO: 30925 - protein, 37 aa, synthetic construct; identical to SEQ ID NO: 11873

SEQ ID NO: 30926 - protein, 33 aa, synthetic construct; identical to SEQ ID NO: 12130

SEQ ID NO: 30927 - protein, 37 aa, synthetic construct; identical to SEQ ID NO: 11873

SEQ ID NO: 30928 - protein, 31 aa, synthetic construct; identical to SEQ ID NO: 11978

SEQ ID NO: 30929 - protein, 36 aa, synthetic construct; identical to SEQ ID NO: 11887

SEQ ID NO: 30930 - protein, 33 aa, synthetic construct; identical to SEQ ID NO: 11932

SEQ ID NO: 30931 - protein, 36 aa, synthetic construct; identical to SEQ ID NO: 11887

SEQ ID NO: 30932 - protein, 33 aa, synthetic construct; identical to SEQ ID NO: 11984

SEQ ID NO: 30933 - protein, 36 aa, synthetic construct; identical to SEQ ID NO: 11971

SEQ ID NO: 30934 - protein, 33 aa, synthetic construct; identical to SEQ ID NO: 11926

SEQ ID NO: 30935 - protein, 36 aa, synthetic construct; identical to SEQ ID NO: 11971

SEQ ID NO: 30936 - protein, 33 aa, synthetic construct; identical to SEQ ID NO: 11928

SEQ ID NO: 30937 - protein, 36 aa, synthetic construct; identical to SEQ ID NO: 11971

SEQ ID NO: 30938 - protein, 33 aa, synthetic construct; identical to SEQ ID NO: 12038

SEQ ID NO: 30939 - protein, 36 aa, synthetic construct; identical to SEQ ID NO: 11875

SEQ ID NO: 30940 - protein, 33 aa, synthetic construct; identical to SEQ ID NO: 11920

SEQ ID NO: 30941 - protein, 36 aa, synthetic construct; identical to SEQ ID NO: 11875

SEQ ID NO: 30942 - protein, 33 aa, synthetic construct; identical to SEQ ID NO: 11878

SEQ ID NO: 30943 - protein, 36 aa, synthetic construct; identical to SEQ ID NO: 11909

SEQ ID NO: 30944 - protein, 33 aa, synthetic construct; identical to SEQ ID NO: 12328

SEQ ID NO: 30945 - protein, 36 aa, synthetic construct; identical to SEQ ID NO: 11909

SEQ ID NO: 30946 - protein, 33 aa, synthetic construct; identical to SEQ ID NO: 11932

SEQ ID NO: 30947 - protein, 36 aa, synthetic construct; identical to SEQ ID NO: 11909

SEQ ID NO: 30948 - protein, 31 aa, synthetic construct; identical to SEQ ID NO: 11978

SEQ ID NO: 30949 - protein, 36 aa, synthetic construct; identical to SEQ ID NO: 11909

SEQ ID NO: 30950 - protein, 33 aa, synthetic construct; identical to SEQ ID NO: 11892

SEQ ID NO: 30951 - protein, 36 aa, synthetic construct; identical to SEQ ID NO: 11909

SEQ ID NO: 30952 - protein, 33 aa, synthetic construct; identical to SEQ ID NO: 11968

SEQ ID NO: 30953 - protein, 36 aa, synthetic construct; identical to SEQ ID NO: 11909

SEQ ID NO: 30954 - protein, 33 aa, synthetic construct; identical to SEQ ID NO: 24470

SEQ ID NO: 30955 - protein, 36 aa, synthetic construct; identical to SEQ ID NO: 11909

SEQ ID NO: 30956 - protein, 33 aa, synthetic construct; identical to SEQ ID NO: 11920

SEQ ID NO: 30957 - protein, 36 aa, synthetic construct; identical to SEQ ID NO: 11909

SEQ ID NO: 30958 - protein, 33 aa, synthetic construct; identical to SEQ ID NO: 11878

SEQ ID NO: 30959 - protein, 36 aa, synthetic construct; identical to SEQ ID NO: 11879

SEQ ID NO: 30960 - protein, 33 aa, synthetic construct; identical to SEQ ID NO: 11940

SEQ ID NO: 30961 - protein, 36 aa, synthetic construct; identical to SEQ ID NO: 11879

SEQ ID NO: 30962 - protein, 33 aa, synthetic construct; identical to SEQ ID NO: 11916

SEQ ID NO: 30963 - protein, 36 aa, synthetic construct; identical to SEQ ID NO: 11879

SEQ ID NO: 30964 - protein, 33 aa, synthetic construct; identical to SEQ ID NO: 11880

SEQ ID NO: 30965 - protein, 36 aa, synthetic construct; identical to SEQ ID NO: 12171

SEQ ID NO: 30966 - protein, 33 aa, synthetic construct; identical to SEQ ID NO: 11874

SEQ ID NO: 30967 - protein, 36 aa, synthetic construct; identical to SEQ ID NO: 11907

SEQ ID NO: 30968 - protein, 33 aa, synthetic construct; identical to SEQ ID NO: 11878

SEQ ID NO: 30969 - protein, 36 aa, synthetic construct; identical to SEQ ID NO: 11907

SEQ ID NO: 30970 - protein, 33 aa, synthetic construct; identical to SEQ ID NO: 11924

SEQ ID NO: 30971 - protein, 36 aa, synthetic construct; identical to SEQ ID NO: 11899

SEQ ID NO: 30972 - protein, 33 aa, synthetic construct; identical to SEQ ID NO: 11932

SEQ ID NO: 30973 - protein, 36 aa, synthetic construct; identical to SEQ ID NO: 11899

SEQ ID NO: 30974 - protein, 33 aa, synthetic construct; identical to SEQ ID NO: 12152

SEQ ID NO: 30975 - protein, 36 aa, synthetic construct; identical to SEQ ID NO: 11899

SEQ ID NO: 30976 - protein, 33 aa, synthetic construct; identical to SEQ ID NO: 11916

SEQ ID NO: 30977 - protein, 36 aa, synthetic construct; identical to SEQ ID NO: 11899

SEQ ID NO: 30978 - protein, 33 aa, synthetic construct; identical to SEQ ID NO: 11886

SEQ ID NO: 30979 - protein, 36 aa, synthetic construct; identical to SEQ ID NO: 11899

SEQ ID NO: 30980 - protein, 33 aa, synthetic construct; identical to SEQ ID NO: 11932

SEQ ID NO: 30981 - protein, 36 aa, synthetic construct; identical to SEQ ID NO: 11899

SEQ ID NO: 30982 - protein, 33 aa, synthetic construct; identical to SEQ ID NO: 11948

SEQ ID NO: 30983 - protein, 35 aa, synthetic construct; identical to SEQ ID NO: 11895

SEQ ID NO: 30984 - protein, 33 aa, synthetic construct; identical to SEQ ID NO: 11896

SEQ ID NO: 30985 - protein, 35 aa, synthetic construct; identical to SEQ ID NO: 11895

SEQ ID NO: 30986 - protein, 33 aa, synthetic construct; identical to SEQ ID NO: 12032

SEQ ID NO: 30987 - protein, 35 aa, synthetic construct; identical to SEQ ID NO: 11895

SEQ ID NO: 30988 - protein, 33 aa, synthetic construct; identical to SEQ ID NO: 11926

SEQ ID NO: 30989 - protein, 35 aa, synthetic construct; identical to SEQ ID NO: 11895

SEQ ID NO: 30990 - protein, 33 aa, synthetic construct; identical to SEQ ID NO: 11918

SEQ ID NO: 30991 - protein, 35 aa, synthetic construct; identical to SEQ ID NO: 11895

SEQ ID NO: 30992 - protein, 33 aa, synthetic construct; identical to SEQ ID NO: 11886

SEQ ID NO: 30993 - DNA, 108 bp, synthetic construct; identical to SEQ ID NO: 13455
  source 1..108: mol_type = other DNA

SEQ ID NO: 30994 - DNA, 99 bp, synthetic construct; identical to SEQ ID NO: 13732
  source 1..99: mol_type = other DNA

SEQ ID NO: 30995 - DNA, 108 bp, synthetic construct; identical to SEQ ID NO: 13383
  source 1..108: mol_type = other DNA

SEQ ID NO: 30996 - DNA, 99 bp, synthetic construct; identical to SEQ ID NO: 25246
  source 1..99: mol_type = other DNA

SEQ ID NO: 30997 - DNA, 108 bp, synthetic construct; identical to SEQ ID NO: 13455
  source 1..108: mol_type = other DNA

SEQ ID NO: 30998 - DNA, 99 bp, synthetic construct; identical to SEQ ID NO: 13722
  source 1..99: mol_type = other DNA

SEQ ID NO: 30999 - DNA, 108 bp, synthetic construct; identical to SEQ ID NO: 13359
  source 1..108: mol_type = other DNA

SEQ ID NO: 31000 - DNA, 99 bp, synthetic construct; identical to SEQ ID NO: 13526
  source 1..99: mol_type = other DNA

SEQ ID NO: 31001 - DNA, 108 bp, synthetic construct; identical to SEQ ID NO: 13359
  source 1..108: mol_type = other DNA

SEQ ID NO: 31002 - DNA, 99 bp, synthetic construct; identical to SEQ ID NO: 13380
  source 1..99: mol_type = other DNA

SEQ ID NO: 31003 - DNA, 108 bp, synthetic construct; identical to SEQ ID NO: 13359
  source 1..108: mol_type = other DNA

SEQ ID NO: 31004 - DNA, 99 bp, synthetic construct; identical to SEQ ID NO: 13470
  source 1..99: mol_type = other DNA

SEQ ID NO: 31005 - DNA, 108 bp, synthetic construct; identical to SEQ ID NO: 13383
  source 1..108: mol_type = other DNA

SEQ ID NO: 31006 - DNA, 99 bp, synthetic construct; identical to SEQ ID NO: 13732
  source 1..99: mol_type = other DNA

SEQ ID NO: 31007 - DNA, 108 bp, synthetic construct; identical to SEQ ID NO: 13451
  source 1..108: mol_type = other DNA

SEQ ID NO: 31008 - DNA, 99 bp, synthetic construct; identical to SEQ ID NO: 13516
  source 1..99: mol_type = other DNA

SEQ ID NO: 31009 - DNA, 108 bp, synthetic construct; identical to SEQ ID NO: 13451
  source 1..108: mol_type = other DNA

SEQ ID NO: 31010 - DNA, 99 bp, synthetic construct; identical to SEQ ID NO: 13732
  source 1..99: mol_type = other DNA

SEQ ID NO: 31011 - DNA, 108 bp, synthetic construct; identical to SEQ ID NO: 13451
  source 1..108: mol_type = other DNA

SEQ ID NO: 31012 - DNA, 102 bp, synthetic construct; identical to SEQ ID NO: 13374
  source 1..102: mol_type = other DNA

SEQ ID NO: 31013 - DNA, 108 bp, synthetic construct; identical to SEQ ID NO: 13451
  source 1..108: mol_type = other DNA

SEQ ID NO: 31014 - DNA, 99 bp, synthetic construct; identical to SEQ ID NO: 13732
  source 1..99: mol_type = other DNA

SEQ ID NO: 31015 - DNA, 108 bp, synthetic construct; identical to SEQ ID NO: 13451
  source 1..108: mol_type = other DNA

SEQ ID NO: 31016 - DNA, 99 bp, synthetic construct; identical to SEQ ID NO: 13400
  source 1..99: mol_type = other DNA

SEQ ID NO: 31017 - DNA, 108 bp, synthetic construct; identical to SEQ ID NO: 13451
  source 1..108: mol_type = other DNA

SEQ ID NO: 31018 - DNA, 99 bp, synthetic construct; identical to SEQ ID NO: 13578
  source 1..99: mol_type = other DNA

SEQ ID NO: 31019 - DNA, 111 bp, synthetic construct; identical to SEQ ID NO: 13357
  source 1..111: mol_type = other DNA

SEQ ID NO: 31020 - DNA, 99 bp, synthetic construct; identical to SEQ ID NO: 13392
  source 1..99: mol_type = other DNA

SEQ ID NO: 31021 - DNA, 111 bp, synthetic construct; identical to SEQ ID NO: 13357
  source 1..111: mol_type = other DNA

SEQ ID NO: 31022 - DNA, 99 bp, synthetic construct; identical to SEQ ID NO: 13614
  source 1..99: mol_type = other DNA

SEQ ID NO: 31023 - DNA, 111 bp, synthetic construct; identical to SEQ ID NO: 13357
  source 1..111: mol_type = other DNA

SEQ ID NO: 31024 - DNA, 93 bp, synthetic construct; identical to SEQ ID NO: 13462
  source 1..93: mol_type = other DNA

SEQ ID NO: 31025 - DNA, 108 bp, synthetic construct; identical to SEQ ID NO: 13371
  source 1..108: mol_type = other DNA

SEQ ID NO: 31026 - DNA, 99 bp, synthetic construct; identical to SEQ ID NO: 13416
  source 1..99: mol_type = other DNA

SEQ ID NO: 31027 - DNA, 108 bp, synthetic construct; identical to SEQ ID NO: 13371
  source 1..108: mol_type = other DNA

SEQ ID NO: 31028 - DNA, 99 bp, synthetic construct; identical to SEQ ID NO: 13468
  source 1..99: mol_type = other DNA

SEQ ID NO: 31029 - DNA, 108 bp, synthetic construct; identical to SEQ ID NO: 13455
  source 1..108: mol_type = other DNA

SEQ ID NO: 31030 - DNA, 99 bp, synthetic construct; identical to SEQ ID NO: 13410
  source 1..99: mol_type = other DNA

SEQ ID NO: 31031 - DNA, 108 bp, synthetic construct; identical to SEQ ID NO: 13455
  source 1..108: mol_type = other DNA

SEQ ID NO: 31032 - DNA, 99 bp, synthetic construct; identical to SEQ ID NO: 13412
  source 1..99: mol_type = other DNA

SEQ ID NO: 31033 - DNA, 108 bp, synthetic construct; identical to SEQ ID NO: 13455
  source 1..108: mol_type = other DNA

SEQ ID NO: 31034 - DNA, 99 bp, synthetic construct; identical to SEQ ID NO: 13612
  source 1..99: mol_type = other DNA

SEQ ID NO: 31035 - DNA, 108 bp, synthetic construct; identical to SEQ ID NO: 13359
  source 1..108: mol_type = other DNA

SEQ ID NO: 31036 - DNA, 99 bp, synthetic construct; identical to SEQ ID NO: 13404
  source 1..99: mol_type = other DNA

SEQ ID NO: 31037 - DNA, 108 bp, synthetic construct; identical to SEQ ID NO: 13359
  source 1..108: mol_type = other DNA

SEQ ID NO: 31038 - DNA, 99 bp, synthetic construct; identical to SEQ ID NO: 13444
  source 1..99: mol_type = other DNA

SEQ ID NO: 31039 - DNA, 108 bp, synthetic construct; identical to SEQ ID NO: 13393
  source 1..108: mol_type = other DNA

SEQ ID NO: 31040 - DNA, 99 bp, synthetic construct; identical to SEQ ID NO: 13812
  source 1..99: mol_type = other DNA

SEQ ID NO: 31041 - DNA, 108 bp, synthetic construct; identical to SEQ ID NO: 13393
  source 1..108: mol_type = other DNA

SEQ ID NO: 31042 - DNA, 99 bp, synthetic construct; identical to SEQ ID NO: 13416
  source 1..99: mol_type = other DNA

SEQ ID NO: 31043 - DNA, 108 bp, synthetic construct; identical to SEQ ID NO: 13393
  source 1..108: mol_type = other DNA

SEQ ID NO: 31044 - DNA, 93 bp, synthetic construct; identical to SEQ ID NO: 13462
  source 1..93: mol_type = other DNA

SEQ ID NO: 31045 - DNA, 108 bp, synthetic construct; identical to SEQ ID NO: 13393
  source 1..108: mol_type = other DNA

SEQ ID NO: 31046 - DNA, 99 bp, synthetic construct; identical to SEQ ID NO: 13376
  source 1..99: mol_type = other DNA

SEQ ID NO: 31047 - DNA, 108 bp, synthetic construct; identical to SEQ ID NO: 13393
  source 1..108: mol_type = other DNA

SEQ ID NO: 31048 - DNA, 99 bp, synthetic construct; identical to SEQ ID NO: 13452
  source 1..99: mol_type = other DNA

SEQ ID NO: 31049 - DNA, 108 bp, synthetic construct; identical to SEQ ID NO: 13393
  source 1..108: mol_type = other DNA

SEQ ID NO: 31050 - DNA, 99 bp, synthetic construct; identical to SEQ ID NO: 25080
  source 1..99: mol_type = other DNA

SEQ ID NO: 31051 - DNA, 108 bp, synthetic construct; identical to SEQ ID NO: 13393
  source 1..108: mol_type = other DNA

SEQ ID NO: 31052 - DNA, 99 bp, synthetic construct; identical to SEQ ID NO: 13404
  source 1..99: mol_type = other DNA

SEQ ID NO: 31053 - DNA, 108 bp, synthetic construct; identical to SEQ ID NO: 13393
  source 1..108: mol_type = other DNA

SEQ ID NO: 31054 - DNA, 99 bp, synthetic construct; identical to SEQ ID NO: 13444
  source 1..99: mol_type = other DNA

SEQ ID NO: 31055 - DNA, 108 bp, synthetic construct; identical to SEQ ID NO: 13363
  source 1..108: mol_type = other DNA

SEQ ID NO: 31056 - DNA, 99 bp, synthetic construct; identical to SEQ ID NO: 13596
  source 1..99: mol_type = other DNA

SEQ ID NO: 31057 - DNA, 108 bp, synthetic construct; identical to SEQ ID NO: 13363
  source 1..108: mol_type = other DNA

SEQ ID NO: 31058 - DNA, 99 bp, synthetic construct; identical to SEQ ID NO: 13400
  source 1..99: mol_type = other DNA

SEQ ID NO: 31059 - DNA, 108 bp, synthetic construct; identical to SEQ ID NO: 13363
  source 1..108: mol_type = other DNA

SEQ ID NO: 31060 - DNA, 99 bp, synthetic construct; identical to SEQ ID NO: 13364
  source 1..99: mol_type = other DNA

SEQ ID NO: 31061 - DNA, 108 bp, synthetic construct; identical to SEQ ID NO: 13655
  source 1..108: mol_type = other DNA

SEQ ID NO: 31062 - DNA, 99 bp, synthetic construct; identical to SEQ ID NO: 13358
  source 1..99: mol_type = other DNA

SEQ ID NO: 31063 - DNA, 108 bp, synthetic construct; identical to SEQ ID NO: 13391
  source 1..108: mol_type = other DNA

SEQ ID NO: 31064 - DNA, 99 bp, synthetic construct; identical to SEQ ID NO: 13362
  source 1..99: mol_type = other DNA

SEQ ID NO: 31065 - DNA, 108 bp, synthetic construct; identical to SEQ ID NO: 13391
  source 1..108: mol_type = other DNA

SEQ ID NO: 31066 - DNA, 99 bp, synthetic construct; identical to SEQ ID NO: 13408
  source 1..99: mol_type = other DNA

SEQ ID NO: 31067 - DNA, 108 bp, synthetic construct; identical to SEQ ID NO: 13383
  source 1..108: mol_type = other DNA

SEQ ID NO: 31068 - DNA, 99 bp, synthetic construct; identical to SEQ ID NO: 13416
  source 1..99: mol_type = other DNA

SEQ ID NO: 31069 - DNA, 108 bp, synthetic construct; identical to SEQ ID NO: 13383
  source 1..108: mol_type = other DNA

SEQ ID NO: 31070 - DNA, 99 bp, synthetic construct; identical to SEQ ID NO: 13636
  source 1..99: mol_type = other DNA

SEQ ID NO: 31071 - DNA, 108 bp, synthetic construct; identical to SEQ ID NO: 13383
  source 1..108: mol_type = other DNA

SEQ ID NO: 31072 - DNA, 99 bp, synthetic construct; identical to SEQ ID NO: 13400
  source 1..99: mol_type = other DNA

SEQ ID NO: 31073 - DNA, 108 bp, synthetic construct; identical to SEQ ID NO: 13383
  source 1..108: mol_type = other DNA

SEQ ID NO: 31074 - DNA, 99 bp, synthetic construct; identical to SEQ ID NO: 13370
  source 1..99: mol_type = other DNA

SEQ ID NO: 31075 - DNA, 108 bp, synthetic construct; identical to SEQ ID NO: 13383
  source 1..108: mol_type = other DNA

SEQ ID NO: 31076 - DNA, 99 bp, synthetic construct; identical to SEQ ID NO: 13416
  source 1..99: mol_type = other DNA

SEQ ID NO: 31077 - DNA, 108 bp, synthetic construct; identical to SEQ ID NO: 13383
  source 1..108: mol_type = other DNA

SEQ ID NO: 31078 - DNA, 99 bp, synthetic construct; identical to SEQ ID NO: 13570
  source 1..99: mol_type = other DNA

SEQ ID NO: 31079 - DNA, 105 bp, synthetic construct; identical to SEQ ID NO: 13379
  source 1..105: mol_type = other DNA

SEQ ID NO: 31080 - DNA, 99 bp, synthetic construct; identical to SEQ ID NO: 13380
  source 1..99: mol_type = other DNA

SEQ ID NO: 31081 - DNA, 105 bp, synthetic construct; identical to SEQ ID NO: 13379
  source 1..105: mol_type = other DNA

SEQ ID NO: 31082 - DNA, 99 bp, synthetic construct; identical to SEQ ID NO: 13516
  source 1..99: mol_type = other DNA

SEQ ID NO: 31083 - DNA, 105 bp, synthetic construct; identical to SEQ ID NO: 13379
  source 1..105: mol_type = other DNA

SEQ ID NO: 31084 - DNA, 99 bp, synthetic construct; identical to SEQ ID NO: 13410
  source 1..99: mol_type = other DNA

SEQ ID NO: 31085 - DNA, 105 bp, synthetic construct; identical to SEQ ID NO: 13379
  source 1..105: mol_type = other DNA

SEQ ID NO: 31086 - DNA, 99 bp, synthetic construct; identical to SEQ ID NO: 13402
  source 1..99: mol_type = other DNA

SEQ ID NO: 31087 - DNA, 105 bp, synthetic construct; identical to SEQ ID NO: 13379
  source 1..105: mol_type = other DNA

SEQ ID NO: 31088 - DNA, 99 bp, synthetic construct; identical to SEQ ID NO: 13370
  source 1..99: mol_type = other DNA

SEQ ID NO: 31089 - protein, 14 aa, synthetic construct
CASSSTGANERLFF

SEQ ID NO: 31090 - protein, 13 aa, synthetic construct
CAVSSYSNYQLIW

SEQ ID NO: 31091 - protein, 15 aa, synthetic construct
CASSIGTGDNQAPLF

SEQ ID NO: 31092 - protein, 13 aa, synthetic construct
CSASNNYAQGLTF

SEQ ID NO: 31093 - protein, 16 aa, synthetic construct
CASSGDWGARAETLYF

SEQ ID NO: 31094 - protein, 14 aa, synthetic construct
CAASIGNYAQGLTF

SEQ ID NO: 31095 - protein, 13 aa, synthetic construct
CASGDGGNSDYTF

SEQ ID NO: 31096 - protein, 12 aa, synthetic construct
CAAGNSGTYQRF

SEQ ID NO: 31097 - protein, 14 aa, synthetic construct
CASGDWGRTGQLYF

SEQ ID NO: 31098 - protein, 13 aa, synthetic construct
CATIGDNNNRIFF

SEQ ID NO: 31099 - protein, 12 aa, synthetic construct
CASGGPGQEQYF

SEQ ID NO: 31100 - protein, 14 aa, synthetic construct
CALGRSSNTNKVVF

SEQ ID NO: 31101 - protein, 16 aa, synthetic construct
CASSPGTIFSGNTLYF

SEQ ID NO: 31102 - protein, 13 aa, synthetic construct
CAVSSYSNYQLIW

SEQ ID NO: 31103 - protein, 13 aa, synthetic construct
CASSQEGGREQYF

SEQ ID NO: 31104 - protein, 15 aa, synthetic construct
CSATYRGSALGRLHF

SEQ ID NO: 31105 - protein, 13 aa, synthetic construct
CASSQDDRDEQYF

SEQ ID NO: 31106 - protein, 13 aa, synthetic construct
CAVSSYSNYQLIW

SEQ ID NO: 31107 - protein, 14 aa, synthetic construct
CASSQDGGAGEQYF

SEQ ID NO: 31108 - protein, 13 aa, synthetic construct
CAAEENYAQGLTF

SEQ ID NO: 31109 - protein, 14 aa, synthetic construct
CASSQGLGGYEQYF

SEQ ID NO: 31110 - protein, 12 aa, synthetic construct
CAVDTGNYKYVF

SEQ ID NO: 31111 - protein, 13 aa, synthetic construct
CASRDWDAYEQYF

SEQ ID NO: 31112 - protein, 17 aa, synthetic construct
CAMREGSNQGGSAKLIF

SEQ ID NO: 31113 - protein, 13 aa, synthetic construct
CASSLGEDAEQFF

SEQ ID NO: 31114 - protein, 12 aa, synthetic construct
CALSMGGYKLTF

SEQ ID NO: 31115 - protein, 12 aa, synthetic construct
CASSPTLYEQYF

SEQ ID NO: 31116 - protein, 14 aa, synthetic construct
CAVSTGANTGKLTF

SEQ ID NO: 31117 - protein, 14 aa, synthetic construct
CASSPGLGYAEQFF

SEQ ID NO: 31118 - protein, 11 aa, synthetic construct
CAASNTNKVVF

SEQ ID NO: 31119 - protein, 14 aa, synthetic construct
CASSFTLGEYEQYF

SEQ ID NO: 31120 - protein, 15 aa, synthetic construct
CIVTDMGTGGYKVVF

SEQ ID NO: 31121 - protein, 14 aa, synthetic construct
CASSQEGPGNTLYF

SEQ ID NO: 31122 - protein, 12 aa, synthetic construct
CALGNNNNAPRF

SEQ ID NO: 31123 - protein, 10 aa, synthetic construct
CASSQYEQYF

SEQ ID NO: 31124 - protein, 12 aa, synthetic construct
CAAFNMGYKLTF

SEQ ID NO: 31125 - protein, 14 aa, synthetic construct
CASSPRQGTNTLYF

SEQ ID NO: 31126 - protein, 14 aa, synthetic construct
CAASIVGDNSKLIW

SEQ ID NO: 31127 - protein, 13 aa, synthetic construct
CASSSRQNTEVFF

SEQ ID NO: 31128 - protein, 14 aa, synthetic construct
CALERSYGNEKITF

SEQ ID NO: 31129 - protein, 14 aa, synthetic construct
CASISRDSSYEQYF

SEQ ID NO: 31130 - protein, 12 aa, synthetic construct
CALNSAGNKLTF

SEQ ID NO: 31131 - protein, 15 aa, synthetic construct
CASGDARQDQDTQYF

SEQ ID NO: 31132 - protein, 15 aa, synthetic construct
CAAPDASSGSWQLIF

SEQ ID NO: 31133 - protein, 15 aa, synthetic construct
CASGGTGANTGQLYF

SEQ ID NO: 31134 - protein, 17 aa, synthetic construct
CAMREGVPGANTGKLTF

SEQ ID NO: 31135 - protein, 13 aa, synthetic construct
CASSEEENTEVFF

SEQ ID NO: 31136 - protein, 16 aa, synthetic construct
CAMRDNTGANTGKLTF

SEQ ID NO: 31137 - protein, 14 aa, synthetic construct
CASSDLGPQDTQYF

SEQ ID NO: 31138 - protein, 16 aa, synthetic construct
CALGPNYGGSGNKLIF

SEQ ID NO: 31139 - protein, 16 aa, synthetic construct
CASSDAGTAPQDTQYF

SEQ ID NO: 31140 - protein, 16 aa, synthetic construct
CIVTDMGGSALGRLHF

SEQ ID NO: 31141 - protein, 16 aa, synthetic construct
CASSDAGGGLYAEQFF

SEQ ID NO: 31142 - protein, 13 aa, synthetic construct
CVVSGNYAQGLTF

SEQ ID NO: 31143 - protein, 13 aa, synthetic construct
CASSDGWQNTLYF

SEQ ID NO: 31144 - protein, 12 aa, synthetic construct
CAGSSNTNKVVF

SEQ ID NO: 31145 - protein, 15 aa, synthetic construct
CASSGWDTSGNTLYF

SEQ ID NO: 31146 - protein, 13 aa, synthetic construct
CAASEGNNNRIFF

SEQ ID NO: 31147 - protein, 12 aa, synthetic construct
CASSVRVEEQYF

SEQ ID NO: 31148 - protein, 14 aa, synthetic construct
CAASGNNAGAKLTF

SEQ ID NO: 31149 - protein, 12 aa, synthetic construct
CASGRKDSPLYF

SEQ ID NO: 31150 - protein, 15 aa, synthetic construct
CAMREGGDSNNRIFF

SEQ ID NO: 31151 - protein, 15 aa, synthetic construct
CASTPTGGAQETLYF

SEQ ID NO: 31152 - protein, 15 aa, synthetic construct
CAASHRGSALGRLHF

SEQ ID NO: 31153 - protein, 16 aa, synthetic construct
CASSPGSGSSGNTLYF

SEQ ID NO: 31154 - protein, 17 aa, synthetic construct
CAMREVESGANTGKLTF

SEQ ID NO: 31155 - protein, 13 aa, synthetic construct
CASSDGGEDTQYF

SEQ ID NO: 31156 - protein, 11 aa, synthetic construct
CALTAGAKLTF

SEQ ID NO: 31157 - protein, 12 aa, synthetic construct
CASSSPQNTLYF

SEQ ID NO: 31158 - protein, 15 aa, synthetic construct
CAASGSGGSNAKLTF

SEQ ID NO: 31159 - protein, 14 aa, synthetic construct
CAWRPGQGVSDYTF

SEQ ID NO: 31160 - protein, 15 aa, synthetic construct
CAMRESNYGNEKITF

SEQ ID NO: 31161 - protein, 15 aa, synthetic construct
CAWSPSFSYNSPLYF

SEQ ID NO: 31162 - protein, 14 aa, synthetic construct
CAVSITGTGSKLSF

SEQ ID NO: 31163 - protein, 16 aa, synthetic construct
CASSPGTIFSGNTLYF

SEQ ID NO: 31164 - protein, 12 aa, synthetic construct
CALGESGQKLVF

SEQ ID NO: 31165 - protein, 11 aa, synthetic construct
CASSIWPEQYF

SEQ ID NO: 31166 - protein, 17 aa, synthetic construct
CALEGRNTGANTGKLTF

SEQ ID NO: 31167 - protein, 14 aa, synthetic construct
CASSIWDRNTEVFF

SEQ ID NO: 31168 - protein, 17 aa, synthetic construct
CAMREGPATGGNNKLTF

SEQ ID NO: 31169 - protein, 11 aa, synthetic construct
CASSIGTEVFF

SEQ ID NO: 31170 - protein, 14 aa, synthetic construct
CALSEFNGNEKITF

SEQ ID NO: 31171 - protein, 13 aa, synthetic construct
CASSMGQGSDYTF

SEQ ID NO: 31172 - protein, 13 aa, synthetic construct
CALSENYAQGLTF

SEQ ID NO: 31173 - protein, 13 aa, synthetic construct
CASANRGADTQYF

SEQ ID NO: 31174 - protein, 13 aa, synthetic construct
CAVSMGGYQNFYF

SEQ ID NO: 31175 - protein, 16 aa, synthetic construct
CTCRTGGGGSNERLFF

SEQ ID NO: 31176 - protein, 11 aa, synthetic construct
CGTGSGGKLTL

SEQ ID NO: 31177 - protein, 13 aa, synthetic construct
CTCSAGGQDTQYF

SEQ ID NO: 31178 - protein, 14 aa, synthetic construct
CSASDGGSGNKLIF

SEQ ID NO: 31179 - protein, 17 aa, synthetic construct
CTCSAPGTGGYQNTLYF

SEQ ID NO: 31180 - protein, 14 aa, synthetic construct
CAASMWTGGYKVVF

SEQ ID NO: 31181 - protein, 14 aa, synthetic construct
CTCSAPGFQNTLYF

SEQ ID NO: 31182 - protein, 13 aa, synthetic construct
CALRDSGYNKLTF

SEQ ID NO: 31183 - protein, 14 aa, synthetic construct
CTCSGDWGAYEQYF

SEQ ID NO: 31184 - protein, 12 aa, synthetic construct
CALRDNNNAPRF

SEQ ID NO: 31185 - DNA, 42 bp, synthetic construct
  source 1..42: mol_type = other DNA
tgtgccagcagctcgacaggggccaacgaaagattatttttc

SEQ ID NO: 31186 - DNA, 39 bp, synthetic construct
  source 1..39: mol_type = other DNA
tgtgcagtgagctcgtatagcaactatcagttgatctgg

SEQ ID NO: 31187 - DNA, 45 bp, synthetic construct; identical to SEQ ID NO: 26033
  source 1..45: mol_type = other DNA

SEQ ID NO: 31188 - DNA, 39 bp, synthetic construct; identical to SEQ ID NO: 26034
  source 1..39: mol_type = other DNA

SEQ ID NO: 31189 - DNA, 48 bp, synthetic construct
  source 1..48: mol_type = other DNA
tgtgccagcagcggggactggggggcgagagcagaaacgctgtatttt

SEQ ID NO: 31190 - DNA, 42 bp, synthetic construct
  source 1..42: mol_type = other DNA
tgtgcagcaagcatcgggaactatgcccagggattaaccttc

SEQ ID NO: 31191 - DNA, 39 bp, synthetic construct
  source 1..39: mol_type = other DNA
tgtgccagcggtgatggggggaactccgactacaccttc

SEQ ID NO: 31192 - DNA, 36 bp, synthetic construct
  source 1..36: mol_type = other DNA
tgtgctgcagggaattctgggacttaccagaggttt

SEQ ID NO: 31193 - DNA, 42 bp, synthetic construct
  source 1..42: mol_type = other DNA
tgtgccagcggtgattgggggcgcaccgggcagctctacttt

SEQ ID NO: 31194 - DNA, 39 bp, synthetic construct
  source 1..39: mol_type = other DNA
tgtgctaccataggggataacaataacagaatcttcttt

SEQ ID NO: 31195 - DNA, 36 bp, synthetic construct
  source 1..36: mol_type = other DNA
tgtgccagcggtggaccgggacaagaacagtacttc

SEQ ID NO: 31196 - DNA, 42 bp, synthetic construct
  source 1..42: mol_type = other DNA
tgtgctctgggtagatcttccaataccaacaaagtcgtcttt

SEQ ID NO: 31197 - DNA, 48 bp, synthetic construct
  source 1..48: mol_type = other DNA
tgtgccagcagccccgggacaatattttctggaaatacgctctatttt

SEQ ID NO: 31198 - DNA, 39 bp, synthetic construct; identical to SEQ ID NO: 31186
  source 1..39: mol_type = other DNA

SEQ ID NO: 31199 - DNA, 39 bp, synthetic construct
  source 1..39: mol_type = other DNA
tgtgccagcagccaagagggggggcgagaacagtacttc

SEQ ID NO: 31200 - DNA, 45 bp, synthetic construct
  source 1..45: mol_type = other DNA
tgctcagcaacctatagaggttcagccttagggaggctgcatttt

SEQ ID NO: 31201 - DNA, 39 bp, synthetic construct
  source 1..39: mol_type = other DNA
tgtgccagcagccaagatgacagggatgaacagtacttc

SEQ ID NO: 31202 - DNA, 39 bp, synthetic construct; identical to SEQ ID NO: 31186
  source 1..39: mol_type = other DNA

SEQ ID NO: 31203 - DNA, 42 bp, synthetic construct
  source 1..42: mol_type = other DNA
tgtgccagcagccaagatgggggggcgggggaacagtacttc

SEQ ID NO: 31204 - DNA, 39 bp, synthetic construct
  source 1..39: mol_type = other DNA
tgtgctgctgaggagaactatgcccagggattaaccttc

SEQ ID NO: 31205 - DNA, 42 bp, synthetic construct
  source 1..42: mol_type = other DNA
tgtgccagcagccagggactgggggggtatgaacagtacttc

SEQ ID NO: 31206 - DNA, 36 bp, synthetic construct
  source 1..36: mol_type = other DNA
tgtgcagtggatacaggaaactacaaatacgtcttt

SEQ ID NO: 31207 - DNA, 39 bp, synthetic construct
  source 1..39: mol_type = other DNA
tgtgccagcagggactgggacgcctatgaacagtacttc

SEQ ID NO: 31208 - DNA, 51 bp, synthetic construct
  source 1..51: mol_type = other DNA
tgtgctatgagagaggggtcgaatcaaggagggtctgcgaagctcatcttt

SEQ ID NO: 31209 - DNA, 39 bp, synthetic construct
  source 1..39: mol_type = other DNA
tgtgccagcagtttgggggaggatgctgagcagttcttc

SEQ ID NO: 31210 - DNA, 36 bp, synthetic construct
  source 1..36: mol_type = other DNA
tgcgctctgagtatggggggctacaaacttaccttc

SEQ ID NO: 31211 - DNA, 36 bp, synthetic construct
  source 1..36: mol_type = other DNA
tgtgccagcagcccgacactatatgaacagtacttc

SEQ ID NO: 31212 - DNA, 42 bp, synthetic construct
  source 1..42: mol_type = other DNA
tgtgctgtgagcactggagctaacactggaaagctcacgttt

SEQ ID NO: 31213 - DNA, 42 bp, synthetic construct
  source 1..42: mol_type = other DNA
tgtgccagcagtccgggactgggttatgctgagcagttcttc

SEQ ID NO: 31214 - DNA, 33 bp, synthetic construct
  source 1..33: mol_type = other DNA
tgtgctgcttccaataccaacaaagtcgtcttt

SEQ ID NO: 31215 - DNA, 42 bp, synthetic construct
  source 1..42: mol_type = other DNA
tgtgccagcagtttcacactgggggagtatgaacagtacttc

SEQ ID NO: 31216 - DNA, 45 bp, synthetic construct
  source 1..45: mol_type = other DNA
tgcattgtgactgacatggggactggaggctataaagtggtcttt

SEQ ID NO: 31217 - DNA, 42 bp, synthetic construct
  source 1..42: mol_type = other DNA
tgtgccagcagccaagaggggcctggaaatacgctctatttt

SEQ ID NO: 31218 - DNA, 36 bp, synthetic construct
  source 1..36: mol_type = other DNA
tgtgctctggggaataacaacaatgccccacgattt

SEQ ID NO: 31219 - DNA, 30 bp, synthetic construct
  source 1..30: mol_type = other DNA
tgtgccagcagccagtatgaacagtacttc

SEQ ID NO: 31220 - DNA, 36 bp, synthetic construct
  source 1..36: mol_type = other DNA
tgtgctgctttcaacatgggctacaaacttaccttc

SEQ ID NO: 31221 - DNA, 42 bp, synthetic construct
  source 1..42: mol_type = other DNA
tgtgccagcagcccccgacagggaacgaacaccttgtacttt

SEQ ID NO: 31222 - DNA, 42 bp, synthetic construct
  source 1..42: mol_type = other DNA
tgtgcagcaagcattgttggtgacaacagtaagctgatttgg

SEQ ID NO: 31223 - DNA, 39 bp, synthetic construct
  source 1..39: mol_type = other DNA
tgtgccagcagctcgcgacaaaacacagaagtcttcttt

SEQ ID NO: 31224 - DNA, 42 bp, synthetic construct
  source 1..42: mol_type = other DNA
tgtgctttggaacgaagctatggaaatgagaaaataactttt

SEQ ID NO: 31225 - DNA, 42 bp, synthetic construct
  source 1..42: mol_type = other DNA
tgtgccagcatctcccgggacagctcctatgaacagtacttc

SEQ ID NO: 31226 - DNA, 36 bp, synthetic construct
  source 1..36: mol_type = other DNA
tgtgccctcaacagtgcagggaacaagctaactttt

SEQ ID NO: 31227 - DNA, 45 bp, synthetic construct
  source 1..45: mol_type = other DNA
tgtgccagcggtgatgcaaggcaggaccaagacacccagtacttt

SEQ ID NO: 31228 - DNA, 45 bp, synthetic construct
  source 1..45: mol_type = other DNA
tgtgctgcacccgatgcatcttctggcagctggcaactcatcttt

SEQ ID NO: 31229 - DNA, 45 bp, synthetic construct
  source 1..45: mol_type = other DNA
tgtgccagcggtgggactggggctaacaccgggcagctctacttt

SEQ ID NO: 31230 - DNA, 51 bp, synthetic construct
  source 1..51: mol_type = other DNA
tgtgctatgagagagggggtccctggagctaacactggaaagctcacgttt

SEQ ID NO: 31231 - DNA, 39 bp, synthetic construct
  source 1..39: mol_type = other DNA
tgtgccagcagtgaggaggaaaacacagaagtcttcttt

SEQ ID NO: 31232 - DNA, 48 bp, synthetic construct
  source 1..48: mol_type = other DNA
tgtgctatgagagataacactggagctaacactggaaagctcacgttt

SEQ ID NO: 31233 - DNA, 42 bp, synthetic construct
  source 1..42: mol_type = other DNA
tgtgccagcagtgatctgggacctcaagacacccagtacttt

SEQ ID NO: 31234 - DNA, 48 bp, synthetic construct
  source 1..48: mol_type = other DNA
tgtgctctggggcccaattatgggggcagtggcaacaagctcatcttt

SEQ ID NO: 31235 - DNA, 48 bp, synthetic construct
  source 1..48: mol_type = other DNA
tgtgccagcagtgatgccgggacagctcctcaagacacccagtacttt

SEQ ID NO: 31236 - DNA, 48 bp, synthetic construct
  source 1..48: mol_type = other DNA
tgcattgtgactgacatgggaggttcagccttagggaggctgcatttt

SEQ ID NO: 31237 - DNA, 48 bp, synthetic construct
  source 1..48: mol_type = other DNA
tgtgccagcagtgatgctggggggggcctctatgctgagcagttcttc

SEQ ID NO: 31238 - DNA, 39 bp, synthetic construct
  source 1..39: mol_type = other DNA
tgtgttgtgagcggtaactatgcccagggattaaccttc

SEQ ID NO: 31239 - DNA, 39 bp, synthetic construct
  source 1..39: mol_type = other DNA
tgtgccagcagtgatgggtggcaaaacaccttgtacttt

SEQ ID NO: 31240 - DNA, 36 bp, synthetic construct
  source 1..36: mol_type = other DNA
tgtgcaggttcttccaataccaacaaagtcgtcttt

SEQ ID NO: 31241 - DNA, 45 bp, synthetic construct
  source 1..45: mol_type = other DNA
tgtgccagcagtgggtgggacacttctggaaatacgctctatttt

SEQ ID NO: 31242 - DNA, 39 bp, synthetic construct
  source 1..39: mol_type = other DNA
tgtgcagcaagtgagggtaacaataacagaatcttcttt

SEQ ID NO: 31243 - DNA, 36 bp, synthetic construct
  source 1..36: mol_type = other DNA
tgtgccagcagtgtcagggtggaggaacagtacttc

SEQ ID NO: 31244 - DNA, 42 bp, synthetic construct
  source 1..42: mol_type = other DNA
tgtgctgcaagtgggaataatgcaggtgccaagctcacattc

SEQ ID NO: 31245 - DNA, 36 bp, synthetic construct
  source 1..36: mol_type = other DNA
tgtgccagcggccggaaggattcgcccctctacttt

SEQ ID NO: 31246 - DNA, 45 bp, synthetic construct
  source 1..45: mol_type = other DNA
tgtgctatgagagagggcggggatagcaataacagaatcttcttt

SEQ ID NO: 31247 - DNA, 45 bp, synthetic construct
  source 1..45: mol_type = other DNA
tgtgccagcaccccgactgggggggcgcaagaaacgctgtatttt

SEQ ID NO: 31248 - DNA, 45 bp, synthetic construct
  source 1..45: mol_type = other DNA
tgtgcagcaagtcatagaggttcagccttagggaggctgcatttt

SEQ ID NO: 31249 - DNA, 48 bp, synthetic construct
  source 1..48: mol_type = other DNA
tgtgccagcagtcccgggagcggatcttctggaaatacgctctatttt

SEQ ID NO: 31250 - DNA, 51 bp, synthetic construct
  source 1..51: mol_type = other DNA
tgtgctatgagagaggtggagtctggagctaacactggaaagctcacgttt

SEQ ID NO: 31251 - DNA, 39 bp, synthetic construct
  source 1..39: mol_type = other DNA
tgtgccagcagtgatgggggggaagacacccagtacttt

SEQ ID NO: 31252 - DNA, 33 bp, synthetic construct
  source 1..33: mol_type = other DNA
tgtgctttgaccgcaggtgccaagctcacattc

SEQ ID NO: 31253 - DNA, 36 bp, synthetic construct
  source 1..36: mol_type = other DNA
tgtgctagcagtagcccgcaaaacaccttgtacttt

SEQ ID NO: 31254 - DNA, 45 bp, synthetic construct
  source 1..45: mol_type = other DNA
tgtgcagctagtggatctggaggaagcaatgcaaagctaaccttc

SEQ ID NO: 31255 - DNA, 42 bp, synthetic construct
  source 1..42: mol_type = other DNA
tgtgcctggagaccgggacagggggtctccgactacaccttc

SEQ ID NO: 31256 - DNA, 45 bp, synthetic construct
  source 1..45: mol_type = other DNA
tgtgctatgagagagtccaactatggaaatgagaaaataactttt

SEQ ID NO: 31257 - DNA, 45 bp, synthetic construct
  source 1..45: mol_type = other DNA
tgtgcctggagtcctagcttttcctataattcgcccctctacttt

SEQ ID NO: 31258 - DNA, 42 bp, synthetic construct
  source 1..42: mol_type = other DNA
tgtgctgtgagcatcacaggcactgggtctaagctgtcattt

SEQ ID NO: 31259 - DNA, 48 bp, synthetic construct; identical to SEQ ID NO: 31197
  source 1..48: mol_type = other DNA

SEQ ID NO: 31260 - DNA, 36 bp, synthetic construct
  source 1..36: mol_type = other DNA
tgtgctctgggtgaaagtggccagaagctggttttt

SEQ ID NO: 31261 - DNA, 33 bp, synthetic construct
  source 1..33: mol_type = other DNA
tgtgccagcagtatatggccggaacagtacttc

SEQ ID NO: 31262 - DNA, 51 bp, synthetic construct
  source 1..51: mol_type = other DNA
tgtgcactggagggccggaacactggagctaacactggaaagctcacgttt

SEQ ID NO: 31263 - DNA, 42 bp, synthetic construct
  source 1..42: mol_type = other DNA
tgtgccagcagtatatgggacaggaacacagaagtcttcttt

SEQ ID NO: 31264 - DNA, 51 bp, synthetic construct
  source 1..51: mol_type = other DNA
tgtgctatgagagagggcccggctactggaggcaataataagctgactttt

SEQ ID NO: 31265 - DNA, 33 bp, synthetic construct
  source 1..33: mol_type = other DNA
tgtgccagcagtatcggcacagaagtcttcttt

SEQ ID NO: 31266 - DNA, 42 bp, synthetic construct
  source 1..42: mol_type = other DNA
tgtgctctgagtgaatttaatggaaatgagaaaataactttt

SEQ ID NO: 31267 - DNA, 39 bp, synthetic construct
  source 1..39: mol_type = other DNA
tgtgccagcagtatgggacagggctccgactacaccttc

SEQ ID NO: 31268 - DNA, 39 bp, synthetic construct
  source 1..39: mol_type = other DNA
tgtgctctgagtgaaaactatgcccagggattaaccttc

SEQ ID NO: 31269 - DNA, 39 bp, synthetic construct
  source 1..39: mol_type = other DNA
tgtgccagcgccaacaggggagcggacacccagtacttt

SEQ ID NO: 31270 - DNA, 39 bp, synthetic construct
  source 1..39: mol_type = other DNA
tgtgcagtgagcatggggggttaccagaacttctatttt

SEQ ID NO: 31271 - DNA, 48 bp, synthetic construct
  source 1..48: mol_type = other DNA
tgcacctgcaggacagggggaggaggctccaacgaaagattatttttc

SEQ ID NO: 31272 - DNA, 33 bp, synthetic construct
  source 1..33: mol_type = other DNA
tgtggtactggcagtggtggaaaactcactttg

SEQ ID NO: 31273 - DNA, 39 bp, synthetic construct
  source 1..39: mol_type = other DNA
tgcacctgcagtgcagggggccaagacacccagtacttt

SEQ ID NO: 31274 - DNA, 42 bp, synthetic construct
  source 1..42: mol_type = other DNA
tgctcagcaagtgatgggggcagtggcaacaagctcatcttt

SEQ ID NO: 31275 - DNA, 51 bp, synthetic construct
  source 1..51: mol_type = other DNA
tgcacctgcagtgctcccgggactggggggtatcaaaacaccttgtacttt

SEQ ID NO: 31276 - DNA, 42 bp, synthetic construct
  source 1..42: mol_type = other DNA
tgtgcagcaagcatgtggactggaggctataaagtggtcttt

SEQ ID NO: 31277 - DNA, 42 bp, synthetic construct
  source 1..42: mol_type = other DNA
tgcacctgcagtgctcctgggtttcaaaacaccttgtacttt

SEQ ID NO: 31278 - DNA, 39 bp, synthetic construct
  source 1..39: mol_type = other DNA
tgtgctctgagggactcgggatacaacaaactcactttt

SEQ ID NO: 31279 - DNA, 42 bp, synthetic construct
  source 1..42: mol_type = other DNA
tgcacctgcagtggagactggggtgcctatgaacagtacttc

SEQ ID NO: 31280 - DNA, 36 bp, synthetic construct
  source 1..36: mol_type = other DNA
tgtgctctgagggataacaacaatgccccacgattt

SEQ ID NO: 31281 - protein, 9 aa, synthetic construct
GHGTKLSVL

SEQ ID NO: 31282 - protein, 10 aa, synthetic construct
GSGTKLIIKP

SEQ ID NO: 31283 - protein, 9 aa, synthetic construct
GEGTRLSVL

SEQ ID NO: 31284 - protein, 10 aa, synthetic construct
GLGTRVSVFP

SEQ ID NO: 31285 - protein, 9 aa, synthetic construct
GSGTRLTVL

SEQ ID NO: 31286 - protein, 10 aa, synthetic construct
GLGTRVSVFP

SEQ ID NO: 31287 - protein, 9 aa, synthetic construct
GSGTRLLVI

SEQ ID NO: 31288 - protein, 10 aa, synthetic construct
GTGTKLQVVP

SEQ ID NO: 31289 - protein, 9 aa, synthetic construct
GEGSKLTVL

SEQ ID NO: 31290 - protein, 10 aa, synthetic construct
GDGTQLVVKP

SEQ ID NO: 31291 - protein, 9 aa, synthetic construct
GPGTRLTVL

SEQ ID NO: 31292 - protein, 10 aa, synthetic construct
GTGTRLQVLP

SEQ ID NO: 31293 - protein, 9 aa, synthetic construct
GEGSRLIVV

SEQ ID NO: 31294 - protein, 10 aa, synthetic construct
GSGTKLIIKP

SEQ ID NO: 31295 - protein, 9 aa, synthetic construct
GPGTRLTVL

SEQ ID NO: 31296 - protein, 10 aa, synthetic construct
GAGTQLIVIP

SEQ ID NO: 31297 - protein, 9 aa, synthetic construct
GPGTRLTVL

SEQ ID NO: 31298 - protein, 10 aa, synthetic construct
GSGTKLIIKP

SEQ ID NO: 31299 - protein, 9 aa, synthetic construct
GPGTRLTVL

SEQ ID NO: 31300 - protein, 10 aa, synthetic construct
GLGTRVSVFP

SEQ ID NO: 31301 - protein, 9 aa, synthetic construct
GPGTRLTVL

SEQ ID NO: 31302 - protein, 10 aa, synthetic construct
GAGTRLKVIA

SEQ ID NO: 31303 - protein, 9 aa, synthetic construct
GPGTRLTVL

SEQ ID NO: 31304 - protein, 10 aa, synthetic construct
GEGTKLTVSS

SEQ ID NO: 31305 - protein, 9 aa, synthetic construct
GPGTRLTVL

SEQ ID NO: 31306 - protein, 10 aa, synthetic construct
GTGTSLLVDP

SEQ ID NO: 31307 - protein, 9 aa, synthetic construct
GPGTRLTVL

SEQ ID NO: 31308 - protein, 10 aa, synthetic construct
GHGTILRVHP

SEQ ID NO: 31309 - protein, 9 aa, synthetic construct
GPGTRLTVL

SEQ ID NO: 31310 - protein, 10 aa, synthetic construct
GTGTRLQVLP

SEQ ID NO: 31311 - protein, 9 aa, synthetic construct
GPGTRLTVL

SEQ ID NO: 31312 - protein, 10 aa, synthetic construct
GSGTRLLVSP

SEQ ID NO: 31313 - protein, 9 aa, synthetic construct
GEGSRLIVV

SEQ ID NO: 31314 - protein, 10 aa, synthetic construct
GAGTKLSVKP

SEQ ID NO: 31315 - protein, 9 aa, synthetic construct
GPGTRLTVL

SEQ ID NO: 31316 - protein, 10 aa, synthetic construct
GTGTSLLVDP

SEQ ID NO: 31317 - protein, 9 aa, synthetic construct
GAGTRLSVL

SEQ ID NO: 31318 - protein, 10 aa, synthetic construct
GLGTSLVVNP

SEQ ID NO: 31319 - protein, 9 aa, synthetic construct
GKGTRLTVV

SEQ ID NO: 31320 - protein, 10 aa, synthetic construct
GAGTKLTIKP

SEQ ID NO: 31321 - protein, 9 aa, synthetic construct
GPGTRLTVL

SEQ ID NO: 31322 - protein, 10 aa, synthetic construct
GIGTRVLVRP

SEQ ID NO: 31323 - protein, 9 aa, synthetic construct
GPGTRLLVL

SEQ ID NO: 31324 - protein, 10 aa, synthetic construct
GSGTQLTVMP

SEQ ID NO: 31325 - protein, 9 aa, synthetic construct
GEGSKLTVL

SEQ ID NO: 31326 - protein, 10 aa, synthetic construct
GHGTILRVHP

SEQ ID NO: 31327 - protein, 9 aa, synthetic construct
GKGTRLTVV

SEQ ID NO: 31328 - protein, 10 aa, synthetic construct
GHGTILRVHP

SEQ ID NO: 31329 - protein, 9 aa, synthetic construct
GPGTRLLVL

SEQ ID NO: 31330 - protein, 10 aa, synthetic construct
GTGTLLSVKP

SEQ ID NO: 31331 - protein, 9 aa, synthetic construct
GPGTRLLVL

SEQ ID NO: 31332 - protein, 10 aa, synthetic construct
GAGTQLIVIP

SEQ ID NO: 31333 - protein, 9 aa, synthetic construct
GPGTRLTVL

SEQ ID NO: 31334 - protein, 10 aa, synthetic construct
GLGTRVSVFP

SEQ ID NO: 31335 - protein, 9 aa, synthetic construct
GAGTRLSVL

SEQ ID NO: 31336 - protein, 10 aa, synthetic construct
GTGTRLQVLP

SEQ ID NO: 31337 - protein, 9 aa, synthetic construct
GEGSRLIVV

SEQ ID NO: 31338 - protein, 10 aa, synthetic construct
GDGTQLVVKP

SEQ ID NO: 31339 - protein, 9 aa, synthetic construct
GPGTRLTVL

SEQ ID NO: 31340 - protein, 10 aa, synthetic construct
GGGTRLTVRP

SEQ ID NO: 31341 - protein, 9 aa, synthetic construct
AAGTRLTVT

SEQ ID NO: 31342 - protein, 10 aa, synthetic construct
GDGTQLVVKP

SEQ ID NO: 31343 - protein, 9 aa, synthetic construct
GSGTRLTVL

SEQ ID NO: 31344 - protein, 10 aa, synthetic construct
GAGTQLIVIP

SEQ ID NO: 31345 - protein, 9 aa, synthetic construct
GEGSRLIVV

SEQ ID NO: 31346 - protein, 10 aa, synthetic construct
GHGTILRVHP

SEQ ID NO: 31347 - protein, 9 aa, synthetic construct
GPGTRLLVL

SEQ ID NO: 31348 - protein, 10 aa, synthetic construct
GGGTRLTVRP

SEQ ID NO: 31349 - protein, 9 aa, synthetic construct
GAGTRLSVL

SEQ ID NO: 31350 - protein, 10 aa, synthetic construct
GKGTKLSVKS

SEQ ID NO: 31351 - protein, 9 aa, synthetic construct
GSGTRLLVI

SEQ ID NO: 31352 - protein, 10 aa, synthetic construct
GAGTKLTIKP

SEQ ID NO: 31353 - protein, 9 aa, synthetic construct
AAGTRLTVT

SEQ ID NO: 31354 - protein, 10 aa, synthetic construct
GKGAKLTVSP

SEQ ID NO: 31355 - protein, 9 aa, synthetic construct
GEGSRLIVV

SEQ ID NO: 31356 - protein, 10 aa, synthetic construct
GQGTILKVYL

SEQ ID NO: 31357 - protein, 9 aa, synthetic construct
GPGTRLTVL

SEQ ID NO: 31358 - protein, 10 aa, synthetic construct
GHGTILRVHP

SEQ ID NO: 31359 - protein, 9 aa, synthetic construct
GKGTRLTVV

SEQ ID NO: 31360 - protein, 10 aa, synthetic construct
GQGTVLSVIP

SEQ ID NO: 31361 - protein, 9 aa, synthetic construct
GKGTRLTVV

SEQ ID NO: 31362 - protein, 10 aa, synthetic construct
GAGTKLTIKP

SEQ ID NO: 31363 - protein, 9 aa, synthetic construct
GSGTRLLVI

SEQ ID NO: 31364 - protein, 10 aa, synthetic construct
GLGTRVSVFP

SEQ ID NO: 31365 - protein, 9 aa, synthetic construct
GPGTRLLVL

SEQ ID NO: 31366 - protein, 10 aa, synthetic construct
GKGTSLTVIP

SEQ ID NO: 31367 - protein, 9 aa, synthetic construct
GHGTKLSVL

SEQ ID NO: 31368 - protein, 10 aa, synthetic construct
GTGTRLQVNL

SEQ ID NO: 31369 - protein, 9 aa, synthetic construct
GPGTRLLVL

SEQ ID NO: 31370 - protein, 10 aa, synthetic construct
GTGTLLSVKP

SEQ ID NO: 31371 - protein, 9 aa, synthetic construct
GAGTRLSVL

SEQ ID NO: 31372 - protein, 10 aa, synthetic construct
GSGTRLLVSP

SEQ ID NO: 31373 - protein, 9 aa, synthetic construct
GAGTRLSVL

SEQ ID NO: 31374 - protein, 10 aa, synthetic construct
GKGTVLLVSP

SEQ ID NO: 31375 - protein, 9 aa, synthetic construct
GPGTRLTVL

SEQ ID NO: 31376 - protein, 10 aa, synthetic construct
GAGTKLSVKP

SEQ ID NO: 31377 - DNA, 28 bp, synthetic construct
  source 1..28: mol_type = other DNA
ggtcatggaaccaagctgtctgtcctgg

SEQ ID NO: 31378 - DNA, 31 bp, synthetic construct; identical to SEQ ID NO: 17856
  source 1..31: mol_type = other DNA

SEQ ID NO: 31379 - DNA, 28 bp, synthetic construct
  source 1..28: mol_type = other DNA
ggagaggggactcgactctctgttctag

SEQ ID NO: 31380 - DNA, 31 bp, synthetic construct; identical to SEQ ID NO: 17828
  source 1..31: mol_type = other DNA

SEQ ID NO: 31381 - DNA, 28 bp, synthetic construct
  source 1..28: mol_type = other DNA
ggctcaggaaccagactgactgttctcg

SEQ ID NO: 31382 - DNA, 31 bp, synthetic construct; identical to SEQ ID NO: 17828
  source 1..31: mol_type = other DNA

SEQ ID NO: 31383 - DNA, 28 bp, synthetic construct
  source 1..28: mol_type = other DNA
ggctcagggaccaggcttttggtaatag

SEQ ID NO: 31384 - DNA, 31 bp, synthetic construct; identical to SEQ ID NO: 17916
  source 1..31: mol_type = other DNA

SEQ ID NO: 31385 - DNA, 28 bp, synthetic construct
  source 1..28: mol_type = other DNA
ggtgaaggctcaaagctgacagtgctgg

SEQ ID NO: 31386 - DNA, 31 bp, synthetic construct; identical to SEQ ID NO: 17812
  source 1..31: mol_type = other DNA

SEQ ID NO: 31387 - DNA, 28 bp, synthetic construct
  source 1..28: mol_type = other DNA
ggtcccggcaccaggctcacggttttag

SEQ ID NO: 31388 - DNA, 31 bp, synthetic construct; identical to SEQ ID NO: 18182
  source 1..31: mol_type = other DNA

SEQ ID NO: 31389 - DNA, 28 bp, synthetic construct
  source 1..28: mol_type = other DNA
ggagaaggaagccggctcattgttgtag

SEQ ID NO: 31390 - DNA, 31 bp, synthetic construct; identical to SEQ ID NO: 17856
  source 1..31: mol_type = other DNA

SEQ ID NO: 31391 - DNA, 28 bp, synthetic construct
  source 1..28: mol_type = other DNA
ggtcccggcaccaggctcacggttttag

SEQ ID NO: 31392 - DNA, 31 bp, synthetic construct; identical to SEQ ID NO: 17964
  source 1..31: mol_type = other DNA

SEQ ID NO: 31393 - DNA, 28 bp, synthetic construct
  source 1..28: mol_type = other DNA
ggtcccggcaccaggctcacggttttag

SEQ ID NO: 31394 - DNA, 31 bp, synthetic construct; identical to SEQ ID NO: 17856
  source 1..31: mol_type = other DNA

SEQ ID NO: 31395 - DNA, 28 bp, synthetic construct
  source 1..28: mol_type = other DNA
ggtcccggcaccaggctcacggttttag

SEQ ID NO: 31396 - DNA, 31 bp, synthetic construct; identical to SEQ ID NO: 17828
  source 1..31: mol_type = other DNA

SEQ ID NO: 31397 - DNA, 28 bp, synthetic construct
  source 1..28: mol_type = other DNA
ggtcccggcaccaggctcacggttttag

SEQ ID NO: 31398 - DNA, 31 bp, synthetic construct; identical to SEQ ID NO: 17864
  source 1..31: mol_type = other DNA

SEQ ID NO: 31399 - DNA, 28 bp, synthetic construct
  source 1..28: mol_type = other DNA
ggtcccggcaccaggctcacggttttag

SEQ ID NO: 31400 - DNA, 31 bp, synthetic construct; identical to SEQ ID NO: 17868
  source 1..31: mol_type = other DNA

SEQ ID NO: 31401 - DNA, 28 bp, synthetic construct
  source 1..28: mol_type = other DNA
ggaccagggacacgactcaccgtcctag

SEQ ID NO: 31402 - DNA, 31 bp, synthetic construct; identical to SEQ ID NO: 18006
  source 1..31: mol_type = other DNA

SEQ ID NO: 31403 - DNA, 28 bp, synthetic construct
  source 1..28: mol_type = other DNA
ggtcccggcaccaggctcacggttttag

SEQ ID NO: 31404 - DNA, 31 bp, synthetic construct; identical to SEQ ID NO: 17840
  source 1..31: mol_type = other DNA

SEQ ID NO: 31405 - DNA, 28 bp, synthetic construct
  source 1..28: mol_type = other DNA
ggaccagggacacgactcaccgtcctag

SEQ ID NO: 31406 - DNA, 31 bp, synthetic construct; identical to SEQ ID NO: 18182
  source 1..31: mol_type = other DNA

SEQ ID NO: 31407 - DNA, 28 bp, synthetic construct
  source 1..28: mol_type = other DNA
ggtcccggcaccaggctcacggttttag

SEQ ID NO: 31408 - DNA, 31 bp, synthetic construct; identical to SEQ ID NO: 17838
  source 1..31: mol_type = other DNA

SEQ ID NO: 31409 - DNA, 28 bp, synthetic construct
  source 1..28: mol_type = other DNA
ggagaaggaagccggctcattgttgtag

SEQ ID NO: 31410 - DNA, 31 bp, synthetic construct; identical to SEQ ID NO: 17910
  source 1..31: mol_type = other DNA

SEQ ID NO: 31411 - DNA, 28 bp, synthetic construct
  source 1..28: mol_type = other DNA
ggtcccggcaccaggctcacggttttag

SEQ ID NO: 31412 - DNA, 31 bp, synthetic construct; identical to SEQ ID NO: 18006
  source 1..31: mol_type = other DNA

SEQ ID NO: 31413 - DNA, 28 bp, synthetic construct
  source 1..28: mol_type = other DNA
ggtgcgggcacccgactatcggtgctag

SEQ ID NO: 31414 - DNA, 31 bp, synthetic construct; identical to SEQ ID NO: 18776
  source 1..31: mol_type = other DNA

SEQ ID NO: 31415 - DNA, 28 bp, synthetic construct
  source 1..28: mol_type = other DNA
ggtaaaggaaccagactcacagttgtag

SEQ ID NO: 31416 - DNA, 31 bp, synthetic construct; identical to SEQ ID NO: 17996
  source 1..31: mol_type = other DNA

SEQ ID NO: 31417 - DNA, 28 bp, synthetic construct
  source 1..28: mol_type = other DNA
ggtcccggcaccaggctcacggttttag

SEQ ID NO: 31418 - DNA, 31 bp, synthetic construct; identical to SEQ ID NO: 18064
  source 1..31: mol_type = other DNA

SEQ ID NO: 31419 - DNA, 28 bp, synthetic construct
  source 1..28: mol_type = other DNA
gggccaggcactcggctcctcgtgttag

SEQ ID NO: 31420 - DNA, 31 bp, synthetic construct; identical to SEQ ID NO: 17884
  source 1..31: mol_type = other DNA

SEQ ID NO: 31421 - DNA, 28 bp, synthetic construct
  source 1..28: mol_type = other DNA
ggtgaaggctcaaagctgacagtgctgg

SEQ ID NO: 31422 - DNA, 31 bp, synthetic construct; identical to SEQ ID NO: 17840
  source 1..31: mol_type = other DNA

SEQ ID NO: 31423 - DNA, 28 bp, synthetic construct
  source 1..28: mol_type = other DNA
ggtaaaggaaccagactcacagttgtag

SEQ ID NO: 31424 - DNA, 31 bp, synthetic construct; identical to SEQ ID NO: 17840
  source 1..31: mol_type = other DNA

SEQ ID NO: 31425 - DNA, 28 bp, synthetic construct
  source 1..28: mol_type = other DNA
gggccaggcactcggctcctcgtgttag

SEQ ID NO: 31426 - DNA, 31 bp, synthetic construct; identical to SEQ ID NO: 17834
  source 1..31: mol_type = other DNA

SEQ ID NO: 31427 - DNA, 28 bp, synthetic construct
  source 1..28: mol_type = other DNA
gggccaggcactcggctcctcgtgttag

SEQ ID NO: 31428 - DNA, 31 bp, synthetic construct; identical to SEQ ID NO: 17964
  source 1..31: mol_type = other DNA

SEQ ID NO: 31429 - DNA, 28 bp, synthetic construct
  source 1..28: mol_type = other DNA
ggaccagggacacgactcaccgtcctag

SEQ ID NO: 31430 - DNA, 31 bp, synthetic construct; identical to SEQ ID NO: 17828
  source 1..31: mol_type = other DNA

SEQ ID NO: 31431 - DNA, 28 bp, synthetic construct
  source 1..28: mol_type = other DNA
ggtgcgggcacccgactatcggtgctag

SEQ ID NO: 31432 - DNA, 31 bp, synthetic construct; identical to SEQ ID NO: 18182
  source 1..31: mol_type = other DNA

SEQ ID NO: 31433 - DNA, 28 bp, synthetic construct
  source 1..28: mol_type = other DNA
ggagaaggaagccggctcattgttgtag

SEQ ID NO: 31434 - DNA, 31 bp, synthetic construct; identical to SEQ ID NO: 17812
  source 1..31: mol_type = other DNA

SEQ ID NO: 31435 - DNA, 28 bp, synthetic construct
  source 1..28: mol_type = other DNA
ggtcccggcaccaggctcacggttttag

SEQ ID NO: 31436 - DNA, 31 bp, synthetic construct; identical to SEQ ID NO: 17822
  source 1..31: mol_type = other DNA

SEQ ID NO: 31437 - DNA, 28 bp, synthetic construct
  source 1..28: mol_type = other DNA
gcggcaggcacccggctcactgtgacag

SEQ ID NO: 31438 - DNA, 31 bp, synthetic construct; identical to SEQ ID NO: 17812
  source 1..31: mol_type = other DNA

SEQ ID NO: 31439 - DNA, 28 bp, synthetic construct
  source 1..28: mol_type = other DNA
ggctcaggaaccagactgactgttctcg

SEQ ID NO: 31440 - DNA, 31 bp, synthetic construct; identical to SEQ ID NO: 17964
  source 1..31: mol_type = other DNA

SEQ ID NO: 31441 - DNA, 28 bp, synthetic construct
  source 1..28: mol_type = other DNA
ggagaaggaagccggctcattgttgtag

SEQ ID NO: 31442 - DNA, 31 bp, synthetic construct; identical to SEQ ID NO: 17840
  source 1..31: mol_type = other DNA

SEQ ID NO: 31443 - DNA, 28 bp, synthetic construct
  source 1..28: mol_type = other DNA
gggccaggcactcggctcctcgtgttag

SEQ ID NO: 31444 - DNA, 31 bp, synthetic construct; identical to SEQ ID NO: 17822
  source 1..31: mol_type = other DNA

SEQ ID NO: 31445 - DNA, 28 bp, synthetic construct
  source 1..28: mol_type = other DNA
ggtgcgggcacccgactatcggtgctag

SEQ ID NO: 31446 - DNA, 31 bp, synthetic construct; identical to SEQ ID NO: 17826
  source 1..31: mol_type = other DNA

SEQ ID NO: 31447 - DNA, 28 bp, synthetic construct
  source 1..28: mol_type = other DNA
ggctcagggaccaggcttttggtaatag

SEQ ID NO: 31448 - DNA, 31 bp, synthetic construct; identical to SEQ ID NO: 17996
  source 1..31: mol_type = other DNA

SEQ ID NO: 31449 - DNA, 28 bp, synthetic construct
  source 1..28: mol_type = other DNA
gcggcaggcacccggctcactgtgacag

SEQ ID NO: 31450 - DNA, 31 bp, synthetic construct; identical to SEQ ID NO: 18008
  source 1..31: mol_type = other DNA

SEQ ID NO: 31451 - DNA, 28 bp, synthetic construct
  source 1..28: mol_type = other DNA
ggagaaggaagccggctcattgttgtag

SEQ ID NO: 31452 - DNA, 31 bp, synthetic construct; identical to SEQ ID NO: 17898
  source 1..31: mol_type = other DNA

SEQ ID NO: 31453 - DNA, 28 bp, synthetic construct
  source 1..28: mol_type = other DNA
ggtcccggcaccaggctcacggttttag

SEQ ID NO: 31454 - DNA, 31 bp, synthetic construct; identical to SEQ ID NO: 17840
  source 1..31: mol_type = other DNA

SEQ ID NO: 31455 - DNA, 28 bp, synthetic construct
  source 1..28: mol_type = other DNA
ggtaaaggaaccagactcacagttgtag

SEQ ID NO: 31456 - DNA, 31 bp, synthetic construct; identical to SEQ ID NO: 17852
  source 1..31: mol_type = other DNA

SEQ ID NO: 31457 - DNA, 28 bp, synthetic construct
  source 1..28: mol_type = other DNA
ggtaaaggaaccagactcacagttgtag

SEQ ID NO: 31458 - DNA, 31 bp, synthetic construct; identical to SEQ ID NO: 17996
  source 1..31: mol_type = other DNA

SEQ ID NO: 31459 - DNA, 28 bp, synthetic construct
  source 1..28: mol_type = other DNA
ggctcagggaccaggcttttggtaatag

SEQ ID NO: 31460 - DNA, 31 bp, synthetic construct; identical to SEQ ID NO: 17828
  source 1..31: mol_type = other DNA

SEQ ID NO: 31461 - DNA, 28 bp, synthetic construct
  source 1..28: mol_type = other DNA
gggccaggcactcggctcctcgtgttag

SEQ ID NO: 31462 - DNA, 31 bp, synthetic construct; identical to SEQ ID NO: 17850
  source 1..31: mol_type = other DNA

SEQ ID NO: 31463 - DNA, 28 bp, synthetic construct
  source 1..28: mol_type = other DNA
ggtcatggaaccaagctgtctgtcctgg

SEQ ID NO: 31464 - DNA, 31 bp, synthetic construct; identical to SEQ ID NO: 17932
  source 1..31: mol_type = other DNA

SEQ ID NO: 31465 - DNA, 28 bp, synthetic construct
  source 1..28: mol_type = other DNA
gggccaggcactcggctcctcgtgttag

SEQ ID NO: 31466 - DNA, 31 bp, synthetic construct; identical to SEQ ID NO: 17834
  source 1..31: mol_type = other DNA

SEQ ID NO: 31467 - DNA, 28 bp, synthetic construct
  source 1..28: mol_type = other DNA
ggtgcgggcacccgactatcggtgctag

SEQ ID NO: 31468 - DNA, 31 bp, synthetic construct; identical to SEQ ID NO: 17838
  source 1..31: mol_type = other DNA

SEQ ID NO: 31469 - DNA, 28 bp, synthetic construct
  source 1..28: mol_type = other DNA
ggtgcgggcacccgactatcggtgctag

SEQ ID NO: 31470 - DNA, 31 bp, synthetic construct; identical to SEQ ID NO: 17862
  source 1..31: mol_type = other DNA

SEQ ID NO: 31471 - DNA, 28 bp, synthetic construct
  source 1..28: mol_type = other DNA
ggtcccggcaccaggctcacggttttag

SEQ ID NO: 31472 - DNA, 31 bp, synthetic construct; identical to SEQ ID NO: 17910
  source 1..31: mol_type = other DNA

SEQ ID NO: 31473 - DNA, 33 bp, synthetic construct
  source 1..33: mol_type = other DNA
tgtgccagcagtgcagggaaaacgctgtatttt

SEQ ID NO: 31474 - DNA, 45 bp, synthetic construct
  source 1..45: mol_type = other DNA
tgtgcagctagtgagtcgacaggcaatactagaaaactcatcttt

SEQ ID NO: 31475 - DNA, 48 bp, synthetic construct
  source 1..48: mol_type = other DNA
tgtgccagcggtggccccggacagggggcctcctatgaacagtacttc

SEQ ID NO: 31476 - DNA, 42 bp, synthetic construct
  source 1..42: mol_type = other DNA
tgtgctgtgagggaggggaataacaataacagaatcttcttt

SEQ ID NO: 31477 - DNA, 48 bp, synthetic construct; identical to SEQ ID NO: 31475
  source 1..48: mol_type = other DNA

SEQ ID NO: 31478 - DNA, 42 bp, synthetic construct
  source 1..42: mol_type = other DNA
tgtgctatgagagaagacacaaatgcttacaaagtcatcttt

SEQ ID NO: 31479 - DNA, 42 bp, synthetic construct
  source 1..42: mol_type = other DNA
tgtgccagcagtggtgacactagtgcagaaacgctgtatttt

SEQ ID NO: 31480 - DNA, 42 bp, synthetic construct
  source 1..42: mol_type = other DNA
tgtgctttgagtgaaaattataaccaggggaagcttatcttt

SEQ ID NO: 31481 - DNA, 39 bp, synthetic construct
  source 1..39: mol_type = other DNA
tgtgccagcggtgatggggacaacacagaagtcttcttt

SEQ ID NO: 31482 - DNA, 42 bp, synthetic construct
  source 1..42: mol_type = other DNA
tgtgctatggccactggaggactaagtggtaaattaacattc

SEQ ID NO: 31483 - DNA, 39 bp, synthetic construct
  source 1..39: mol_type = other DNA
tgtgccagcagtcagggacaggggtatgaacagtacttc

SEQ ID NO: 31484 - DNA, 39 bp, synthetic construct
  source 1..39: mol_type = other DNA
tgtgctctgtccatgtctaattacaacgtgctttacttc

SEQ ID NO: 31485 - DNA, 42 bp, synthetic construct
  source 1..42: mol_type = other DNA
tgtgccagcggttccgggacagcaaactccgactacaccttc

SEQ ID NO: 31486 - DNA, 39 bp, synthetic construct
  source 1..39: mol_type = other DNA
tgtgctctgagctataatgcaggtgccaagctcacattc

SEQ ID NO: 31487 - DNA, 48 bp, synthetic construct
  source 1..48: mol_type = other DNA
tgtgccagcagccctcacagggggcaggcaaactccgactacaccttc

SEQ ID NO: 31488 - DNA, 42 bp, synthetic construct
  source 1..42: mol_type = other DNA
tgtgctgtgagggtcatgcctaattacaacgtgctttacttc

SEQ ID NO: 31489 - DNA, 45 bp, synthetic construct
  source 1..45: mol_type = other DNA
tgtgcaagcaggtcgactggggataaccaagacacccagtacttt

SEQ ID NO: 31490 - DNA, 45 bp, synthetic construct
  source 1..45: mol_type = other DNA
tgtgctgctgaggtctttggaggaagcaatgcaaagctaaccttc

SEQ ID NO: 31491 - DNA, 42 bp, synthetic construct
  source 1..42: mol_type = other DNA
tgtgccagcggccccgggacagcaaactccgactacaccttc

SEQ ID NO: 31492 - DNA, 39 bp, synthetic construct
  source 1..39: mol_type = other DNA
tgtgctgtgagccataactatgcccagggattaaccttc

SEQ ID NO: 31493 - DNA, 42 bp, synthetic construct
  source 1..42: mol_type = other DNA
tgtgccagcagggactggggtagtgcagaaacgctgtatttt

SEQ ID NO: 31494 - DNA, 36 bp, synthetic construct
  source 1..36: mol_type = other DNA
tgcgcagtcaagaataacaataacagaatcttcttt

SEQ ID NO: 31495 - DNA, 45 bp, synthetic construct
  source 1..45: mol_type = other DNA
tgcacctgcagtgcggagggggctgacaccgggcagctctacttt

SEQ ID NO: 31496 - DNA, 33 bp, synthetic construct
  source 1..33: mol_type = other DNA
tgtgctactgagggaggcagagctctgatattt

SEQ ID NO: 31497 - DNA, 42 bp, synthetic construct
  source 1..42: mol_type = other DNA
tgcacctgcagtgcgggacaggggaacacagaagtcttcttt

SEQ ID NO: 31498 - DNA, 36 bp, synthetic construct
  source 1..36: mol_type = other DNA
tgtgctgatgggggcagtggcaacaagctcatcttt

SEQ ID NO: 31499 - DNA, 42 bp, synthetic construct
  source 1..42: mol_type = other DNA
tgtgccagcagtataaccgataaccaagacacccagtacttt

SEQ ID NO: 31500 - DNA, 39 bp, synthetic construct
  source 1..39: mol_type = other DNA
tgtgcagcaagcggtaactatgcccagggattaaccttc

SEQ ID NO: 31501 - DNA, 45 bp, synthetic construct
  source 1..45: mol_type = other DNA
tgtgccagcagcctcgggactgggggggcgcttgaacagtacttc

SEQ ID NO: 31502 - DNA, 36 bp, synthetic construct
  source 1..36: mol_type = other DNA
tgtgttctggagactggaggctataaagtggtcttt

SEQ ID NO: 31503 - DNA, 36 bp, synthetic construct
  source 1..36: mol_type = other DNA
tgtgccagcggtgatgcctggtatgaacagtacttc

SEQ ID NO: 31504 - DNA, 51 bp, synthetic construct
  source 1..51: mol_type = other DNA
tgtgctatggaactgtggggcactggagctaacactggaaagctcacgttt

SEQ ID NO: 31505 - DNA, 42 bp, synthetic construct; identical to SEQ ID NO: 31485
  source 1..42: mol_type = other DNA

SEQ ID NO: 31506 - DNA, 39 bp, synthetic construct
  source 1..39: mol_type = other DNA
tgtgctgtgacccataactatgcccagggattaaccttc

SEQ ID NO: 31507 - DNA, 30 bp, synthetic construct
  source 1..30: mol_type = other DNA
tgtgcctggagccccgcagaagtcttcttt

SEQ ID NO: 31508 - DNA, 45 bp, synthetic construct
  source 1..45: mol_type = other DNA
tgtgctgtgaccctcgggacaggaggtgcagatagactcaccttt

SEQ ID NO: 31509 - DNA, 39 bp, synthetic construct
  source 1..39: mol_type = other DNA
tgtgccagcagtgacagaacctatgctgagcagttcttc

SEQ ID NO: 31510 - DNA, 39 bp, synthetic construct
  source 1..39: mol_type = other DNA
tgtgctctgagtgaaggaggtgcagatagactcaccttt

SEQ ID NO: 31511 - DNA, 39 bp, synthetic construct
  source 1..39: mol_type = other DNA
tgtgcctggaggggggggcgcaccgggcagctctacttt

SEQ ID NO: 31512 - DNA, 39 bp, synthetic construct
  source 1..39: mol_type = other DNA
tgcgcagtcacctaccagggaggcagagctctgatattt

SEQ ID NO: 31513 - DNA, 36 bp, synthetic construct
  source 1..36: mol_type = other DNA
tgtgccagcggtggtagtcaaaacaccttgtacttt

SEQ ID NO: 31514 - DNA, 39 bp, synthetic construct
  source 1..39: mol_type = other DNA
tgcgcagtcaaatccacgggttaccagaacttctatttt

SEQ ID NO: 31515 - DNA, 45 bp, synthetic construct
  source 1..45: mol_type = other DNA
tgtgccagcggtgaagggtggggggcctcagaaacgctgtatttt

SEQ ID NO: 31516 - DNA, 51 bp, synthetic construct
  source 1..51: mol_type = other DNA
tgtgctatgagagagggccgggctactggaggcaataataagctgactttt

SEQ ID NO: 31517 - DNA, 42 bp, synthetic construct
  source 1..42: mol_type = other DNA
tgtgccagcagtgattgggggggtgcagaaacgctgtatttt

SEQ ID NO: 31518 - DNA, 42 bp, synthetic construct
  source 1..42: mol_type = other DNA
tgtgctctgagtggacggcagggaggcagagctctgatattt

SEQ ID NO: 31519 - DNA, 39 bp, synthetic construct
  source 1..39: mol_type = other DNA
tgtgccagcagtcggactgcgtatgctgagcagttcttc

SEQ ID NO: 31520 - DNA, 36 bp, synthetic construct
  source 1..36: mol_type = other DNA
tgtgctgcaagttggggcaactatcagttgatctgg

SEQ ID NO: 31521 - DNA, 45 bp, synthetic construct
  source 1..45: mol_type = other DNA
tgtgccagcagtaacagggggcggaacaccgggcagctctacttt

SEQ ID NO: 31522 - DNA, 36 bp, synthetic construct
  source 1..36: mol_type = other DNA
tgcgcagtcagctccaataccgacaaagtcgtcttt

SEQ ID NO: 31523 - DNA, 39 bp, synthetic construct
  source 1..39: mol_type = other DNA
tgtgccagcggggtggggggtcaaaacaccttgtacttt

SEQ ID NO: 31524 - DNA, 39 bp, synthetic construct
  source 1..39: mol_type = other DNA
tgtgctgtgaaaaacacgggttaccagaacttctatttt

SEQ ID NO: 31525 - DNA, 45 bp, synthetic construct
  source 1..45: mol_type = other DNA
tgtgccagcagtgatgctgggggcgatgcagaaacgctgtatttt

SEQ ID NO: 31526 - DNA, 39 bp, synthetic construct
  source 1..39: mol_type = other DNA
tgtgcagcaagcgactcgggatacaacaaactcactttt

SEQ ID NO: 31527 - DNA, 42 bp, synthetic construct
  source 1..42: mol_type = other DNA
tgtgccagcagtgatgcgggggggggaaatgaacagtacttc

SEQ ID NO: 31528 - DNA, 39 bp, synthetic construct
  source 1..39: mol_type = other DNA
tgtgctttggaagatacaggaaactacaaatacgtcttt

SEQ ID NO: 31529 - DNA, 45 bp, synthetic construct
  source 1..45: mol_type = other DNA
tgtgccagcagccacgggacagggtataattcgcccctctacttt

SEQ ID NO: 31530 - DNA, 39 bp, synthetic construct
  source 1..39: mol_type = other DNA
tgtgcagcaagcgggggaggtgcagatagactcaccttt

SEQ ID NO: 31531 - DNA, 30 bp, synthetic construct
  source 1..30: mol_type = other DNA
tgtgccagcggtgggtatgaacagtacttc

SEQ ID NO: 31532 - DNA, 45 bp, synthetic construct
  source 1..45: mol_type = other DNA
tgtgctctgggtgggaatcaaggagggtctgcgaagctcatcttt

SEQ ID NO: 31533 - DNA, 36 bp, synthetic construct
  source 1..36: mol_type = other DNA
tgtgccagcagtgaggggggctccgactacaccttc

SEQ ID NO: 31534 - DNA, 42 bp, synthetic construct
  source 1..42: mol_type = other DNA
tgtgctctgagtgttgacacaaatgcttacaaagtcatcttt

SEQ ID NO: 31535 - DNA, 33 bp, synthetic construct
  source 1..33: mol_type = other DNA
tgtgcctggagcctaggactggataagtacttc

SEQ ID NO: 31536 - DNA, 36 bp, synthetic construct
  source 1..36: mol_type = other DNA
tgtgcagctagcgatagcaactatcagttgatctgg

SEQ ID NO: 31537 - DNA, 39 bp, synthetic construct
  source 1..39: mol_type = other DNA
tgtgccagcagtatatgggaggacacagaagtcttcttt

SEQ ID NO: 31538 - DNA, 51 bp, synthetic construct
  source 1..51: mol_type = other DNA
tgtgctatgagagaggctaacactggagctaacactggaaagctcacgttt

SEQ ID NO: 31539 - DNA, 45 bp, synthetic construct
  source 1..45: mol_type = other DNA
tgtgccagcagtccggatggggggcgcccagacacccagtacttt

SEQ ID NO: 31540 - DNA, 27 bp, synthetic construct
  source 1..27: mol_type = other DNA
tgtgcagcacataacagaatcttcttt

SEQ ID NO: 31541 - DNA, 42 bp, synthetic construct
  source 1..42: mol_type = other DNA
tgtgccagcagcgaccccaggtatgcagaaacgctgtatttt

SEQ ID NO: 31542 - DNA, 42 bp, synthetic construct
  source 1..42: mol_type = other DNA
tgtgctttgaggggctcaggaggaaactacaaacctacgttt

SEQ ID NO: 31543 - DNA, 36 bp, synthetic construct; identical to SEQ ID NO: 29419
  source 1..36: mol_type = other DNA

SEQ ID NO: 31544 - DNA, 48 bp, synthetic construct
  source 1..48: mol_type = other DNA
tgtgctttgagtgccgggataacaggcaataccggaaaactcatcttt

SEQ ID NO: 31545 - DNA, 33 bp, synthetic construct
  source 1..33: mol_type = other DNA
tgtgcctggagaaactcctatgaacagtacttc

SEQ ID NO: 31546 - DNA, 39 bp, synthetic construct
  source 1..39: mol_type = other DNA
tgtgctgtgagctggaacatgggctacaaacttaccttc

SEQ ID NO: 31547 - DNA, 42 bp, synthetic construct
  source 1..42: mol_type = other DNA
tgcacctgcagtcggggacagggagacacagaagtcttcttt

SEQ ID NO: 31548 - DNA, 39 bp, synthetic construct
  source 1..39: mol_type = other DNA
tgtgcagtgagcatgaggggcagctggcaactcatcttt

SEQ ID NO: 31549 - DNA, 45 bp, synthetic construct
  source 1..45: mol_type = other DNA
tgcacctgcagtgcagcagacagttccaacgaaagattatttttc

SEQ ID NO: 31550 - DNA, 42 bp, synthetic construct
  source 1..42: mol_type = other DNA
tgcgcagcagggctatcttctggcagctggcaactcatcttt

SEQ ID NO: 31551 - DNA, 45 bp, synthetic construct
  source 1..45: mol_type = other DNA
tgtggtgctagggatcgactgggggggcgctatgaacagtacttc

SEQ ID NO: 31552 - DNA, 42 bp, synthetic construct
  source 1..42: mol_type = other DNA
tgtgctacagatgcggggactggaggctataaagtggtcttt

SEQ ID NO: 31553 - DNA, 48 bp, synthetic construct
  source 1..48: mol_type = other DNA
tgtgccagcagccagctggggactcctaaccaagacacccagtacttt

SEQ ID NO: 31554 - DNA, 45 bp, synthetic construct
  source 1..45: mol_type = other DNA
tgtgctatgagaaacactggagctaacactggaaagctcacgttt

SEQ ID NO: 31555 - DNA, 39 bp, synthetic construct
  source 1..39: mol_type = other DNA
tgtgccagcagtgatgacagtgcagaaacgctgtatttt

SEQ ID NO: 31556 - DNA, 39 bp, synthetic construct
  source 1..39: mol_type = other DNA
tgtgcagccttaacaggcaataccggaaaactcatcttt

SEQ ID NO: 31557 - DNA, 45 bp, synthetic construct
  source 1..45: mol_type = other DNA
tgtgccagcagtatccggacactttccaacgaaagattatttttc

SEQ ID NO: 31558 - DNA, 45 bp, synthetic construct
  source 1..45: mol_type = other DNA
tgtgctgcgagcatctatacaggaggtgcagatagactcaccttt

SEQ ID NO: 31559 - DNA, 42 bp, synthetic construct
  source 1..42: mol_type = other DNA
tgtgccagcagtgatccagggagggacacagaagtcttcttt

SEQ ID NO: 31560 - DNA, 45 bp, synthetic construct
  source 1..45: mol_type = other DNA
tgtgctatgagagagggcggaggaggtgcagatagactcaccttt

SEQ ID NO: 31561 - DNA, 42 bp, synthetic construct; identical to SEQ ID NO: 31517
  source 1..42: mol_type = other DNA

SEQ ID NO: 31562 - DNA, 42 bp, synthetic construct
  source 1..42: mol_type = other DNA
tgcgcagtcagtgcgacttcaagtggccagaagctggttttt

SEQ ID NO: 31563 - DNA, 45 bp, synthetic construct
  source 1..45: mol_type = other DNA
tgtgccagcagccgagacaaacttagtgcagaaacgctgtatttt

SEQ ID NO: 31564 - DNA, 36 bp, synthetic construct
  source 1..36: mol_type = other DNA
tgtgccgagggggactatgcaaacaagatgatcttt

SEQ ID NO: 31565 - DNA, 33 bp, synthetic construct
  source 1..33: mol_type = other DNA
tgcacctgcagtgaggacagagaacagtacttc

SEQ ID NO: 31566 - DNA, 36 bp, synthetic construct
  source 1..36: mol_type = other DNA
tgtgctatagctccatacaataacagaatcttcttt

SEQ ID NO: 31567 - DNA, 45 bp, synthetic construct
  source 1..45: mol_type = other DNA
tgtgccagcagccaaggcctgggggactatgctgagcagttcttc

SEQ ID NO: 31568 - DNA, 39 bp, synthetic construct
  source 1..39: mol_type = other DNA
tgtgcatcgcggacacaggttgtggggcagctcactttc

SEQ ID NO: 31569 - DNA, 36 bp, synthetic construct
  source 1..36: mol_type = other DNA
tgtgccagcagccaagggaacacagaagtcttcttt

SEQ ID NO: 31570 - DNA, 42 bp, synthetic construct
  source 1..42: mol_type = other DNA
tgtgctttgagcgcatcctcctccttcagcaagctggtgttt

SEQ ID NO: 31571 - DNA, 45 bp, synthetic construct
  source 1..45: mol_type = other DNA
tgtgccagcagccaaggacagtataactatgctgagcagttcttc

SEQ ID NO: 31572 - DNA, 39 bp, synthetic construct
  source 1..39: mol_type = other DNA
tgcgcagtcagggaaaataacaacaatgccccacgattt

SEQ ID NO: 31573 - DNA, 39 bp, synthetic construct
  source 1..39: mol_type = other DNA
tgtgccagcggtctgactggggaagaaacgctgtatttt

SEQ ID NO: 31574 - DNA, 39 bp, synthetic construct
  source 1..39: mol_type = other DNA
tgcgcagtcagtgcgggtaacaacaatgccccacgattt

SEQ ID NO: 31575 - DNA, 39 bp, synthetic construct
  source 1..39: mol_type = other DNA
tgtgccagcagtgaggggatccaagacacccagtacttt

SEQ ID NO: 31576 - DNA, 42 bp, synthetic construct
  source 1..42: mol_type = other DNA
tgtatcctgatgactggaggaagcaatgcaaagctaaccttc

SEQ ID NO: 31577 - DNA, 42 bp, synthetic construct
  source 1..42: mol_type = other DNA
tgtgccagcagccaagaccagggtgcagaaacgctgtatttt

SEQ ID NO: 31578 - DNA, 51 bp, synthetic construct
  source 1..51: mol_type = other DNA
tgcattgtgactgacatcctcacctcaggaggaaactacaaacctacgttt

SEQ ID NO: 31579 - DNA, 45 bp, synthetic construct
  source 1..45: mol_type = other DNA
tgtgccagcagccaagtctggggcaaccaagacacccagtacttt

SEQ ID NO: 31580 - DNA, 36 bp, synthetic construct
  source 1..36: mol_type = other DNA
tgcgcagtcagtgcatctgggacttaccagaggttt

SEQ ID NO: 31581 - DNA, 42 bp, synthetic construct
  source 1..42: mol_type = other DNA
tgtgccagcggtgagcagggacagggctatgaacagtacttc

SEQ ID NO: 31582 - DNA, 36 bp, synthetic construct
  source 1..36: mol_type = other DNA
tgtgctgtgagcccctgggggacttaccagaggttt

SEQ ID NO: 31583 - DNA, 48 bp, synthetic construct
  source 1..48: mol_type = other DNA
tgtgccagcagtggggacaggggcttttccaacgaaagattatttttc

SEQ ID NO: 31584 - DNA, 45 bp, synthetic construct
  source 1..45: mol_type = other DNA
tgtgctgctggggacgggacaggcaataccggaaaactcatcttt

SEQ ID NO: 31585 - DNA, 45 bp, synthetic construct
  source 1..45: mol_type = other DNA
tgtgccagcagccaagagtggcagggcgggacagaagtcttcttt

SEQ ID NO: 31586 - DNA, 36 bp, synthetic construct
  source 1..36: mol_type = other DNA
tgtgctctgggggggggaggcagagctctgatattt

SEQ ID NO: 31587 - DNA, 42 bp, synthetic construct
  source 1..42: mol_type = other DNA
tgtgccagcggtagcagggtttccaacgaaagattatttttc

SEQ ID NO: 31588 - DNA, 39 bp, synthetic construct
  source 1..39: mol_type = other DNA
tgtgctctgagtcctaatagcaactatcagttgatctgg

SEQ ID NO: 31589 - DNA, 45 bp, synthetic construct
  source 1..45: mol_type = other DNA
tgtgccagcggtgaggggacaggggacaaccaggctccgcttttt

SEQ ID NO: 31590 - DNA, 36 bp, synthetic construct
  source 1..36: mol_type = other DNA
tgtgctatgagagttaacaataacagaatcttcttt

SEQ ID NO: 31591 - DNA, 45 bp, synthetic construct; identical to SEQ ID NO: 31589
  source 1..45: mol_type = other DNA

SEQ ID NO: 31592 - DNA, 36 bp, synthetic construct
  source 1..36: mol_type = other DNA
tgtgtcctggggtataaccaggggaagcttatcttt

SEQ ID NO: 31593 - DNA, 42 bp, synthetic construct
  source 1..42: mol_type = other DNA
tgtgccagcagcttaggggggagctcctatgaacagtacttc

SEQ ID NO: 31594 - DNA, 42 bp, synthetic construct
  source 1..42: mol_type = other DNA
tgtgctgcgagccacgacacaaatgcttacaaagtcatcttt

SEQ ID NO: 31595 - DNA, 45 bp, synthetic construct
  source 1..45: mol_type = other DNA
tgtgccagcagttcggactgggggaacaccgggcagctctacttt

SEQ ID NO: 31596 - DNA, 39 bp, synthetic construct
  source 1..39: mol_type = other DNA
tgtgcagcgattactggcagtggtggaaaactcactttg

SEQ ID NO: 31597 - DNA, 45 bp, synthetic construct
  source 1..45: mol_type = other DNA
tgtgccagcagcttgggactttttaactatgctgagcagttcttc

SEQ ID NO: 31598 - DNA, 42 bp, synthetic construct
  source 1..42: mol_type = other DNA
tgtgctatggaacctaataactatgcccagggattaaccttc

SEQ ID NO: 31599 - DNA, 36 bp, synthetic construct
  source 1..36: mol_type = other DNA
tgtgccagcggcaagaacaccgggcagctctacttt

SEQ ID NO: 31600 - DNA, 42 bp, synthetic construct
  source 1..42: mol_type = other DNA
tgtgctgtgagccaaatggatagcaactatcagttgatctgg

SEQ ID NO: 31601 - DNA, 45 bp, synthetic construct
  source 1..45: mol_type = other DNA
tgtgccagcggtgagggactggttagtcaaaacaccttgtacttt

SEQ ID NO: 31602 - DNA, 45 bp, synthetic construct
  source 1..45: mol_type = other DNA
tgtgctctggggaacactggagctaacactggaaagctcacgttt

SEQ ID NO: 31603 - DNA, 45 bp, synthetic construct
  source 1..45: mol_type = other DNA
tgtgccagcggtgatccgggacaggggtgggctgagcagttcttc

SEQ ID NO: 31604 - DNA, 45 bp, synthetic construct
  source 1..45: mol_type = other DNA
tgtgcagttaggacttatgggagcagtggcaacaagctcatcttt

SEQ ID NO: 31605 - DNA, 36 bp, synthetic construct
  source 1..36: mol_type = other DNA
tgtgccagcggtgatgcggattatgaacagtacttc

SEQ ID NO: 31606 - DNA, 42 bp, synthetic construct
  source 1..42: mol_type = other DNA
tgtgctctgggtgatttttataaccaggggaagcttatcttt

SEQ ID NO: 31607 - DNA, 45 bp, synthetic construct
  source 1..45: mol_type = other DNA
tgtgccagcggtgatgctggggggggctatgctgagcagttcttc

SEQ ID NO: 31608 - DNA, 36 bp, synthetic construct
  source 1..36: mol_type = other DNA
tgtgcagtgaatccgggttaccagaacttctatttt

SEQ ID NO: 31609 - DNA, 33 bp, synthetic construct
  source 1..33: mol_type = other DNA
tgtgccagcacagacaacacagaagtcttcttt

SEQ ID NO: 31610 - DNA, 42 bp, synthetic construct
  source 1..42: mol_type = other DNA
tgtgctttgagtgccccttctggcagctggcaactcatcttt

SEQ ID NO: 31611 - DNA, 48 bp, synthetic construct
  source 1..48: mol_type = other DNA
tgtgcctggagtcctgactggggggctagtgcagaaacgctgtatttt

SEQ ID NO: 31612 - DNA, 39 bp, synthetic construct
  source 1..39: mol_type = other DNA
tgtgctttggggaataatgcaggtgccaagctcacattc

SEQ ID NO: 31613 - DNA, 45 bp, synthetic construct
  source 1..45: mol_type = other DNA
tgtgcctggagtctccgtctggggagtcaaaacaccttgtacttt

SEQ ID NO: 31614 - DNA, 45 bp, synthetic construct
  source 1..45: mol_type = other DNA
tgtgcagctagtgacggggcaggcaatactagaaaactcatcttt

SEQ ID NO: 31615 - DNA, 39 bp, synthetic construct
  source 1..39: mol_type = other DNA
tgtgccagcagcctcgggctgggagacacccagtacttt

SEQ ID NO: 31616 - DNA, 48 bp, synthetic construct
  source 1..48: mol_type = other DNA
tgtgctgtgagcgcggaggcatcctcctccttcagcaagctggtgttt

SEQ ID NO: 31617 - DNA, 36 bp, synthetic construct
  source 1..36: mol_type = other DNA
tgtggtgctagggatgggggaggggaacagtacttc

SEQ ID NO: 31618 - DNA, 33 bp, synthetic construct
  source 1..33: mol_type = other DNA
tgtgctgtgaggaacaacaatgccccacgattt

SEQ ID NO: 31619 - DNA, 42 bp, synthetic construct
  source 1..42: mol_type = other DNA
tgtgccagcagccggacaggggagagaaatacgctctatttt

SEQ ID NO: 31620 - DNA, 42 bp, synthetic construct
  source 1..42: mol_type = other DNA
tgtgcagcaagctctaggaacatgggctacaaacttaccttc

SEQ ID NO: 31621 - DNA, 42 bp, synthetic construct
  source 1..42: mol_type = other DNA
tgtgccagcagtacagggggaacaaactccgactacaccttc

SEQ ID NO: 31622 - DNA, 42 bp, synthetic construct
  source 1..42: mol_type = other DNA
tgtgttctgggtgctacaggaggtgcagatagactcaccttt

SEQ ID NO: 31623 - DNA, 36 bp, synthetic construct
  source 1..36: mol_type = other DNA
tgtgccagcagtgacagggtttatgaacagtacttc

SEQ ID NO: 31624 - DNA, 36 bp, synthetic construct
  source 1..36: mol_type = other DNA
tgcgcaggaaacacgggttaccagaacttctatttt

SEQ ID NO: 31625 - DNA, 36 bp, synthetic construct
  source 1..36: mol_type = other DNA
tgtgccagccagactgggggggatgaacagtacttc

SEQ ID NO: 31626 - DNA, 39 bp, synthetic construct
  source 1..39: mol_type = other DNA
tgtgctacagatgacacaaatgcttacaaagtcatcttt

SEQ ID NO: 31627 - DNA, 42 bp, synthetic construct
  source 1..42: mol_type = other DNA
tgtgccagcagccaaacaatttccaacgaaagattatttttc

SEQ ID NO: 31628 - DNA, 39 bp, synthetic construct
  source 1..39: mol_type = other DNA
tgtgctatggaaggttcagccttagggaggctgcatttt

SEQ ID NO: 31629 - DNA, 45 bp, synthetic construct
  source 1..45: mol_type = other DNA
tgtgccagcagccaagatccagtttccaacgaaagattatttttc

SEQ ID NO: 31630 - DNA, 42 bp, synthetic construct
  source 1..42: mol_type = other DNA
tgtgctatgaattatgggggcagtggcaacaagctcatcttt

SEQ ID NO: 31631 - DNA, 42 bp, synthetic construct
  source 1..42: mol_type = other DNA
tgtgccagcagcccgacagggaccaccgggcagctctacttt

SEQ ID NO: 31632 - DNA, 48 bp, synthetic construct
  source 1..48: mol_type = other DNA
tgctcagcaagtagggatagaggttcagccttagggaggctgcatttt

SEQ ID NO: 31633 - DNA, 45 bp, synthetic construct
  source 1..45: mol_type = other DNA
tgtgccagcagttgggggacagggggtgcagaaacgctgtatttt

SEQ ID NO: 31634 - DNA, 42 bp, synthetic construct
  source 1..42: mol_type = other DNA
tgtgcagctagtgaagacacaaatgcttacaaagtcatcttt

SEQ ID NO: 31635 - DNA, 42 bp, synthetic construct
  source 1..42: mol_type = other DNA
tgtgctagcaaacagggggcgcgggacacagaagtcttcttt

SEQ ID NO: 31636 - DNA, 42 bp, synthetic construct
  source 1..42: mol_type = other DNA
tgtgcagcaagcaagactgccagtttggggaaactgcagttt

SEQ ID NO: 31637 - DNA, 42 bp, synthetic construct
  source 1..42: mol_type = other DNA
tgtgccagcagctacgacagatctggaaatacgctctatttt

SEQ ID NO: 31638 - DNA, 45 bp, synthetic construct
  source 1..45: mol_type = other DNA
tgtgctatggaagacccgaacacgggttaccagaacttctatttt

SEQ ID NO: 31639 - DNA, 42 bp, synthetic construct
  source 1..42: mol_type = other DNA
tgtgccagcggtgacagggggagtcaaaacaccttgtacttt

SEQ ID NO: 31640 - DNA, 39 bp, synthetic construct
  source 1..39: mol_type = other DNA
tgtgctatgagagagggggggaccgacaaagtcgtcttt

SEQ ID NO: 31641 - DNA, 39 bp, synthetic construct
  source 1..39: mol_type = other DNA
tgtgccagcggtgatcccacaaactccgactacaccttc

SEQ ID NO: 31642 - DNA, 39 bp, synthetic construct
  source 1..39: mol_type = other DNA
tgtgctgcaagtggaaggaacaacaatgccccacgattt

SEQ ID NO: 31643 - DNA, 48 bp, synthetic construct
  source 1..48: mol_type = other DNA
tgtgccagcggtgatgagacaggggaaccaaacacagaagtcttcttt

SEQ ID NO: 31644 - DNA, 42 bp, synthetic construct
  source 1..42: mol_type = other DNA
tgtgctgcaagtgataatacaggaaactacaaatacgtcttt

SEQ ID NO: 31645 - DNA, 36 bp, synthetic construct
  source 1..36: mol_type = other DNA
tgtgccagcggtgattcgggactgggggtccccttc

SEQ ID NO: 31646 - DNA, 42 bp, synthetic construct
  source 1..42: mol_type = other DNA
tgcgcagtcagcgcaacttcaagtggccagaagctggttttt

SEQ ID NO: 31647 - DNA, 42 bp, synthetic construct
  source 1..42: mol_type = other DNA
tgtgccagcggtggggggggaagtcaaaacaccttgtacttt

SEQ ID NO: 31648 - DNA, 45 bp, synthetic construct
  source 1..45: mol_type = other DNA
tgtgctatgagaggtaataataatgcaggtgccaagctcacattc

SEQ ID NO: 31649 - DNA, 42 bp, synthetic construct
  source 1..42: mol_type = other DNA
tgtgccagcagtccacagggcggaaacacagaagtcttcttt

SEQ ID NO: 31650 - DNA, 42 bp, synthetic construct
  source 1..42: mol_type = other DNA
tgtgctgcatccaatacaggaggtgcagatagactcaccttt

SEQ ID NO: 31651 - DNA, 48 bp, synthetic construct
  source 1..48: mol_type = other DNA
tgtgccagcagtgcagggacaggggggtataattcgcccctctacttt

SEQ ID NO: 31652 - DNA, 51 bp, synthetic construct
  source 1..51: mol_type = other DNA
tgtgctctgggtgatccggaggctactggaggcaataataagctgactttt

SEQ ID NO: 31653 - DNA, 39 bp, synthetic construct
  source 1..39: mol_type = other DNA
tgtgccagcgggacaggggaaggaaatacgctctatttt

SEQ ID NO: 31654 - DNA, 42 bp, synthetic construct
  source 1..42: mol_type = other DNA
tgtgctgcaagtgcagggggaggtgcagatagactcaccttt

SEQ ID NO: 31655 - DNA, 36 bp, synthetic construct
  source 1..36: mol_type = other DNA
tgtgcctggagtatccgtcaaaacaccttgtacttt

SEQ ID NO: 31656 - DNA, 39 bp, synthetic construct
  source 1..39: mol_type = other DNA
tgtgcagctacctccacgggttaccagaacttctatttt

SEQ ID NO: 31657 - DNA, 45 bp, synthetic construct
  source 1..45: mol_type = other DNA
tgtggtgctagtccgggactggggggtctagttgaacagtacttc

SEQ ID NO: 31658 - DNA, 45 bp, synthetic construct
  source 1..45: mol_type = other DNA
tgtgctatgagagaggggtcctcctccttcagcaagctggtgttt

SEQ ID NO: 31659 - DNA, 42 bp, synthetic construct
  source 1..42: mol_type = other DNA
tgtgccagcagcaccgggactgggggatatgaacagtacttc

SEQ ID NO: 31660 - DNA, 42 bp, synthetic construct
  source 1..42: mol_type = other DNA
tgtgctactgcggccaactatggaaatgagaaaataactttt

SEQ ID NO: 31661 - DNA, 39 bp, synthetic construct
  source 1..39: mol_type = other DNA
tgtgccagcgggactgctagtgcagaaacgctgtatttt

SEQ ID NO: 31662 - DNA, 39 bp, synthetic construct
  source 1..39: mol_type = other DNA
tgtgctactgtctcttctggcagctggcaactcatcttt

SEQ ID NO: 31663 - DNA, 33 bp, synthetic construct
  source 1..33: mol_type = other DNA
tgcacctgcagtgcacagacagaagtcttcttt

SEQ ID NO: 31664 - DNA, 42 bp, synthetic construct
  source 1..42: mol_type = other DNA
tgtgctgtgagccccctcaccaatacaggcaaattaaccttt

SEQ ID NO: 31665 - DNA, 42 bp, synthetic construct
  source 1..42: mol_type = other DNA
tgtgccagcagccaagataacaactatgctgagcagttcttc

SEQ ID NO: 31666 - DNA, 48 bp, synthetic construct
  source 1..48: mol_type = other DNA
tgtgctctgagtgatctaccttcttctggcagctggcaactcatcttt

SEQ ID NO: 31667 - DNA, 36 bp, synthetic construct
  source 1..36: mol_type = other DNA
tgtgccagcagttcgggggttgctgagcagttcttc

SEQ ID NO: 31668 - DNA, 36 bp, synthetic construct
  source 1..36: mol_type = other DNA
tgtgttcttatggactatgcaaacaagatgatcttt

SEQ ID NO: 31669 - DNA, 48 bp, synthetic construct
  source 1..48: mol_type = other DNA
tgtgccagcagttctctcgacagggagagtgcagaaacgctgtatttt

SEQ ID NO: 31670 - DNA, 39 bp, synthetic construct
  source 1..39: mol_type = other DNA
tgtgctgcgactagcaacatgggctacaaacttaccttc

SEQ ID NO: 31671 - DNA, 45 bp, synthetic construct
  source 1..45: mol_type = other DNA
tgtgccagcagccaagtctgggggaggtcctatgaacagtacttc

SEQ ID NO: 31672 - DNA, 51 bp, synthetic construct
  source 1..51: mol_type = other DNA
tgtgttctgagtataggggggcggcaaggcactgggtctaagctgtcattt

SEQ ID NO: 31673 - DNA, 36 bp, synthetic construct
  source 1..36: mol_type = other DNA
tgtgccagcaatgggggttcctatgaacagtacttc

SEQ ID NO: 31674 - DNA, 36 bp, synthetic construct
  source 1..36: mol_type = other DNA
tgtgctttggacccaaatgcttacaaagtcatcttt

SEQ ID NO: 31675 - DNA, 36 bp, synthetic construct
  source 1..36: mol_type = other DNA
tgtgccagcagctggggacagcaggctccgcttttt

SEQ ID NO: 31676 - DNA, 36 bp, synthetic construct
  source 1..36: mol_type = other DNA
tgtgctgctcgggatagcaactatcagttgatctgg

SEQ ID NO: 31677 - DNA, 42 bp, synthetic construct
  source 1..42: mol_type = other DNA
tgtgccagcggtgaaggcagggcaaacacagaagtcttcttt

SEQ ID NO: 31678 - DNA, 42 bp, synthetic construct
  source 1..42: mol_type = other DNA
tgtgctatgagagaaggggactatgcaaacaagatgatcttt

SEQ ID NO: 31679 - DNA, 39 bp, synthetic construct
  source 1..39: mol_type = other DNA
tgtgccagcggtgccctggggaaagacacccagtacttt

SEQ ID NO: 31680 - DNA, 33 bp, synthetic construct
  source 1..33: mol_type = other DNA
tgtggtcaaggcactgggtctaagctgtcattt

SEQ ID NO: 31681 - DNA, 36 bp, synthetic construct
  source 1..36: mol_type = other DNA
tgtgccagctcgactgggggggctgagcagttcttc

SEQ ID NO: 31682 - DNA, 36 bp, synthetic construct
  source 1..36: mol_type = other DNA
tgtgctgtgagggaagggaccgacaaagtcgtcttt

SEQ ID NO: 31683 - DNA, 36 bp, synthetic construct
  source 1..36: mol_type = other DNA
tgtgccagcagtgagggcgagtatgaacagtacttc

SEQ ID NO: 31684 - DNA, 39 bp, synthetic construct
  source 1..39: mol_type = other DNA
tgtgctctgacaccaggaggaaactacaaacctacgttt

SEQ ID NO: 31685 - DNA, 42 bp, synthetic construct
  source 1..42: mol_type = other DNA
tgtgccagcagtgatcaggcaggggtggacacccagtacttt

SEQ ID NO: 31686 - DNA, 48 bp, synthetic construct
  source 1..48: mol_type = other DNA
tgtgcagtgacccccccggcatcctcctccttcagcaagctggtgttt

SEQ ID NO: 31687 - DNA, 36 bp, synthetic construct
  source 1..36: mol_type = other DNA
tgtgccagcaggacatcaaactccgactacaccttc

SEQ ID NO: 31688 - DNA, 36 bp, synthetic construct
  source 1..36: mol_type = other DNA
tgtgctggggggggcagtggcaacaagctcatcttt

SEQ ID NO: 31689 - DNA, 48 bp, synthetic construct
  source 1..48: mol_type = other DNA
tgtgccagcagtgatgcatcacaggggtacaaccaggctccgcttttt

SEQ ID NO: 31690 - DNA, 42 bp, synthetic construct
  source 1..42: mol_type = other DNA
tgtgctctgggtgaacaaggagggtctgcgaagctcatcttt

SEQ ID NO: 31691 - DNA, 42 bp, synthetic construct
  source 1..42: mol_type = other DNA
tgtgcctggagtctagaggaccgccaagacacccagtacttt

SEQ ID NO: 31692 - DNA, 45 bp, synthetic construct
  source 1..45: mol_type = other DNA
tgtgctatgagagactccaactatggaaatgagaaaataactttt

SEQ ID NO: 31693 - DNA, 45 bp, synthetic construct
  source 1..45: mol_type = other DNA
tgtggtgctagcggggggggcgctttccaagacacccagtacttt

SEQ ID NO: 31694 - DNA, 42 bp, synthetic construct
  source 1..42: mol_type = other DNA
tgtgctctgagccctgacacaaatgcttacaaagtcatcttt

SEQ ID NO: 31695 - DNA, 39 bp, synthetic construct
  source 1..39: mol_type = other DNA
tgtgccagcagtatcggggcaaactccgactacaccttc

SEQ ID NO: 31696 - DNA, 48 bp, synthetic construct
  source 1..48: mol_type = other DNA
tgcgcagtcagtcctccatatacaggaggtgcagatagactcaccttt

SEQ ID NO: 31697 - DNA, 48 bp, synthetic construct
  source 1..48: mol_type = other DNA
tgcacctgcagtgccggactgggggggaacaccgggcagctctacttt

SEQ ID NO: 31698 - DNA, 39 bp, synthetic construct
  source 1..39: mol_type = other DNA
tgtgcagcagccggagctaacactggaaagctcacgttt

SEQ ID NO: 31699 - DNA, 39 bp, synthetic construct
  source 1..39: mol_type = other DNA
tgcacctgcagtgcgggacaggactatgaacagtacttc

SEQ ID NO: 31700 - DNA, 39 bp, synthetic construct
  source 1..39: mol_type = other DNA
tgtgctcttgcgaacacgggttaccagaacttctatttt

SEQ ID NO: 31701 - DNA, 36 bp, synthetic construct
  source 1..36: mol_type = other DNA
tgcacctgcagtgggacagcctatgaacagtacttc

SEQ ID NO: 31702 - DNA, 45 bp, synthetic construct
  source 1..45: mol_type = other DNA
tgtgctatgagagagactggagctaacactggaaagctcacgttt

SEQ ID NO: 31703 - DNA, 45 bp, synthetic construct
  source 1..45: mol_type = other DNA
tgcacctgcagtggggacagggcaaacaccgggcagctctacttt

SEQ ID NO: 31704 - DNA, 45 bp, synthetic construct
  source 1..45: mol_type = other DNA
tgtgcagcattgaattatgggagcagtggcaacaagctcatcttt

SEQ ID NO: 31705 - DNA, 45 bp, synthetic construct
  source 1..45: mol_type = other DNA
tgtgccagcagccaagaagggacagacaaccaggctccgcttttt

SEQ ID NO: 31706 - DNA, 39 bp, synthetic construct
  source 1..39: mol_type = other DNA
tgtgctatgagaggttcagccttagggaggctgcatttt

SEQ ID NO: 31707 - DNA, 33 bp, synthetic construct
  source 1..33: mol_type = other DNA
tgtgccagcagccaagacaacaaacagtacttc

SEQ ID NO: 31708 - DNA, 45 bp, synthetic construct
  source 1..45: mol_type = other DNA
tgtgctctgggttcccttaacacgggttaccagaacttctatttt

SEQ ID NO: 31709 - DNA, 42 bp, synthetic construct
  source 1..42: mol_type = other DNA
tgtgccagcagccaagctggggggggagacacccagtacttt

SEQ ID NO: 31710 - DNA, 36 bp, synthetic construct
  source 1..36: mol_type = other DNA
tgtgcagcaaggaacatgggctacaaacttaccttc

SEQ ID NO: 31711 - DNA, 39 bp, synthetic construct
  source 1..39: mol_type = other DNA
tgtgcaagcagccgcgactggggtgaaacgctgtatttt

SEQ ID NO: 31712 - DNA, 42 bp, synthetic construct
  source 1..42: mol_type = other DNA
tgtgcagcaagtgtggacacgggttaccagaacttctatttt

SEQ ID NO: 31713 - DNA, 42 bp, synthetic construct
  source 1..42: mol_type = other DNA
tgtgccagctctaactggtctagtgcagaaacgctgtatttt

SEQ ID NO: 31714 - DNA, 39 bp, synthetic construct
  source 1..39: mol_type = other DNA
tgtgctctgagttattactatgcaaacaagatgatcttt

SEQ ID NO: 31715 - DNA, 39 bp, synthetic construct
  source 1..39: mol_type = other DNA
tgtgccagcagtgggacagggaacacagaagtcttcttt

SEQ ID NO: 31716 - DNA, 36 bp, synthetic construct
  source 1..36: mol_type = other DNA
tgtgctttggagggtaacaataacagaatcttcttt

SEQ ID NO: 31717 - DNA, 42 bp, synthetic construct
  source 1..42: mol_type = other DNA
tgtgccagcagtttctcggacagctcctatgaacagtacttc

SEQ ID NO: 31718 - DNA, 33 bp, synthetic construct
  source 1..33: mol_type = other DNA
tgtgccttcacgggttaccagaacttctatttt

SEQ ID NO: 31719 - DNA, 33 bp, synthetic construct
  source 1..33: mol_type = other DNA
tgtgccagcagttttagggacacccagtacttt

SEQ ID NO: 31720 - DNA, 45 bp, synthetic construct
  source 1..45: mol_type = other DNA
tgcgcagcaggtgagggcgctggaggcaataataagctgactttt

SEQ ID NO: 31721 - DNA, 36 bp, synthetic construct
  source 1..36: mol_type = other DNA
tgtgccagcagccaagaaaaggctgggggggcgtgg

SEQ ID NO: 31722 - DNA, 42 bp, synthetic construct
  source 1..42: mol_type = other DNA
tgtgctgtgagcatttggtctaattacaacgtgctttacttc

SEQ ID NO: 31723 - DNA, 45 bp, synthetic construct
  source 1..45: mol_type = other DNA
tgtgccagcagccaaggaaggacagggaacgaaagattatttttc

SEQ ID NO: 31724 - DNA, 39 bp, synthetic construct
  source 1..39: mol_type = other DNA
tgtgttctgggtgagggaggaaactacaaacctacgttt

SEQ ID NO: 31725 - DNA, 45 bp, synthetic construct
  source 1..45: mol_type = other DNA
tgtgccagcagcccagggactggggggaatgctgagcagttcttc

SEQ ID NO: 31726 - DNA, 36 bp, synthetic construct
  source 1..36: mol_type = other DNA
tgtgttctggacacaggaaactacaaatacgtcttt

SEQ ID NO: 31727 - DNA, 48 bp, synthetic construct
  source 1..48: mol_type = other DNA
tgtgccagcagccccggctgggggggtagctcctatgaacagtacttc

SEQ ID NO: 31728 - DNA, 36 bp, synthetic construct; identical to SEQ ID NO: 26058
  source 1..36: mol_type = other DNA

SEQ ID NO: 31729 - DNA, 30 bp, synthetic construct
  source 1..30: mol_type = other DNA
tgtgccagcagctcctatgaacagtacttc

SEQ ID NO: 31730 - DNA, 33 bp, synthetic construct
  source 1..33: mol_type = other DNA
tgtgctgctgatggaggctataaagtggtcttt

SEQ ID NO: 31731 - DNA, 45 bp, synthetic construct; identical to SEQ ID NO: 31597
  source 1..45: mol_type = other DNA

SEQ ID NO: 31732 - DNA, 48 bp, synthetic construct
  source 1..48: mol_type = other DNA
tgtgctatgagagaagtgacaactgccagtttggggaaactgcagttt

SEQ ID NO: 31733 - DNA, 48 bp, synthetic construct
  source 1..48: mol_type = other DNA
tgtgccagcggtgaagtgacagggtataactatgctgagcagttcttc

SEQ ID NO: 31734 - DNA, 36 bp, synthetic construct
  source 1..36: mol_type = other DNA
tgtgcagtgaacgactatgcccagggattaaccttc

SEQ ID NO: 31735 - DNA, 36 bp, synthetic construct
  source 1..36: mol_type = other DNA
tgtgccagcggtgaggacagcacagaagtcttcttt

SEQ ID NO: 31736 - DNA, 45 bp, synthetic construct
  source 1..45: mol_type = other DNA
tgtgctctgaccggaacctcaggaggaaactacaaacctacgttt

SEQ ID NO: 31737 - DNA, 42 bp, synthetic construct
  source 1..42: mol_type = other DNA
tgtgccagcggtgagggactgggtcaagacacccagtacttt

SEQ ID NO: 31738 - DNA, 36 bp, synthetic construct
  source 1..36: mol_type = other DNA
tgtgctatagacaccaatacaggcaaattaaccttt

SEQ ID NO: 31739 - DNA, 42 bp, synthetic construct
  source 1..42: mol_type = other DNA
tgtgccagcggtgatcaggattctggaaatacgctctatttt

SEQ ID NO: 31740 - DNA, 48 bp, synthetic construct
  source 1..48: mol_type = other DNA
tgcgcagtcaggtcgaattatgggggcagtggcaacaagctcatcttt

SEQ ID NO: 31741 - DNA, 42 bp, synthetic construct
  source 1..42: mol_type = other DNA
tgtgccagcggtgatggggggggctcctatgaacagtacttc

SEQ ID NO: 31742 - DNA, 51 bp, synthetic construct
  source 1..51: mol_type = other DNA
tgtgctatgagagagaaaaattctggaggaagcaatgcaaagctaaccttc

SEQ ID NO: 31743 - DNA, 36 bp, synthetic construct
  source 1..36: mol_type = other DNA
tgtgccagcacaggggttagcacagaagtcttcttt

SEQ ID NO: 31744 - DNA, 33 bp, synthetic construct
  source 1..33: mol_type = other DNA
tgcgcagggactggaggctataaagtggtcttt

SEQ ID NO: 31745 - DNA, 42 bp, synthetic construct
  source 1..42: mol_type = other DNA
tgtgccagcaggactggggccttctcctatgaacagtacttc

SEQ ID NO: 31746 - DNA, 36 bp, synthetic construct
  source 1..36: mol_type = other DNA
tgcgcagttcggaataacaataacagaatcttcttt

SEQ ID NO: 31747 - DNA, 36 bp, synthetic construct
  source 1..36: mol_type = other DNA
tgtgccagcagggacagggtgggggaacagtacttc

SEQ ID NO: 31748 - DNA, 48 bp, synthetic construct
  source 1..48: mol_type = other DNA
tgtgctatgagagtaaacactggagctaacactggaaagctcacgttt

SEQ ID NO: 31749 - DNA, 45 bp, synthetic construct
  source 1..45: mol_type = other DNA
tgtgccagcagtgacgcgggacagggtgcagaaacgctgtatttt

SEQ ID NO: 31750 - DNA, 36 bp, synthetic construct
  source 1..36: mol_type = other DNA
tgcgcagtcgacacaaatgcttacaaagtcatcttt

SEQ ID NO: 31751 - DNA, 39 bp, synthetic construct
  source 1..39: mol_type = other DNA
tgtgccagcagtgaggctgcaaacacagaagtcttcttt

SEQ ID NO: 31752 - DNA, 42 bp, synthetic construct
  source 1..42: mol_type = other DNA
tgtgcactgggtactggagctaacactggaaagctcacgttt

SEQ ID NO: 31753 - DNA, 36 bp, synthetic construct
  source 1..36: mol_type = other DNA
tgtgccagcagtgagggacaatatgaacagtacttc

SEQ ID NO: 31754 - DNA, 45 bp, synthetic construct
  source 1..45: mol_type = other DNA
tgtgcagcaagtgcgaatacagaaggtgcagatagactcaccttt

SEQ ID NO: 31755 - DNA, 42 bp, synthetic construct
  source 1..42: mol_type = other DNA
tgtgccagcagtgatcctggtagtcaaaacaccttgtacttt

SEQ ID NO: 31756 - DNA, 48 bp, synthetic construct
  source 1..48: mol_type = other DNA
tgtgctttgagtgatcgcccaggcactgggagtaacaggctcactttt

SEQ ID NO: 31757 - DNA, 33 bp, synthetic construct
  source 1..33: mol_type = other DNA
tgtgccagcagtgatgcaggcaccttgtacttt

SEQ ID NO: 31758 - DNA, 45 bp, synthetic construct
  source 1..45: mol_type = other DNA
tgtgctgctgaggcttatgggagcagtggcaacaagctcatcttt

SEQ ID NO: 31759 - DNA, 45 bp, synthetic construct
  source 1..45: mol_type = other DNA
tgtgccagcaaggggactggggtaaacaccgggcagctctacttt

SEQ ID NO: 31760 - DNA, 45 bp, synthetic construct
  source 1..45: mol_type = other DNA
tgtgctgccccccgggccaactatggaaatgagaaaataactttt

SEQ ID NO: 31761 - DNA, 42 bp, synthetic construct
  source 1..42: mol_type = other DNA
tgtgccagcacccaaacaggtagtgcagaaacgctgtatttt

SEQ ID NO: 31762 - DNA, 42 bp, synthetic construct
  source 1..42: mol_type = other DNA
tgtgctatgagaaagggaggaagcaatgcaaagctaaccttc

SEQ ID NO: 31763 - DNA, 42 bp, synthetic construct
  source 1..42: mol_type = other DNA
tgtgccagcagggacaggggggaccgtgctgagcagttcttc

SEQ ID NO: 31764 - DNA, 33 bp, synthetic construct
  source 1..33: mol_type = other DNA
tgtgctgcgagcccttaccagaacttctatttt

SEQ ID NO: 31765 - DNA, 42 bp, synthetic construct
  source 1..42: mol_type = other DNA
tgtgccagcagggactggggaagtcaaaacaccttgtacttt

SEQ ID NO: 31766 - DNA, 36 bp, synthetic construct
  source 1..36: mol_type = other DNA
tgcgcagtcaaaaataacaataacagaatcttcttt

SEQ ID NO: 31767 - DNA, 39 bp, synthetic construct
  source 1..39: mol_type = other DNA
tgtgccagcagtccgggacaggatgctgagcagttcttc

SEQ ID NO: 31768 - DNA, 39 bp, synthetic construct
  source 1..39: mol_type = other DNA
tgtgcagcaacgacacaggttgtggggcagctcactttc

SEQ ID NO: 31769 - DNA, 42 bp, synthetic construct
  source 1..42: mol_type = other DNA
tgtgccagcagtgatgcggggctgggggagaccttgtacttt

SEQ ID NO: 31770 - DNA, 48 bp, synthetic construct
  source 1..48: mol_type = other DNA
tgtgctgctgaggccctgtcctcaggaggaaactacaaacctacgttt

SEQ ID NO: 31771 - DNA, 42 bp, synthetic construct
  source 1..42: mol_type = other DNA
tgtgctagcagtagaagggacaggggcacagaagtcttcttt

SEQ ID NO: 31772 - DNA, 39 bp, synthetic construct; identical to SEQ ID NO: 26214
  source 1..39: mol_type = other DNA

SEQ ID NO: 31773 - DNA, 42 bp, synthetic construct
  source 1..42: mol_type = other DNA
tgtgctagcagtagagggggcagaaacacagaagtcttcttt

SEQ ID NO: 31774 - DNA, 48 bp, synthetic construct
  source 1..48: mol_type = other DNA
tgtgctatgagagagggcggaaataactatgcccagggattaaccttc

SEQ ID NO: 31775 - DNA, 30 bp, synthetic construct
  source 1..30: mol_type = other DNA
tgtgcctggagggggggtgaacagtacttc

SEQ ID NO: 31776 - DNA, 42 bp, synthetic construct
  source 1..42: mol_type = other DNA
tgtgctctgagcggtacagaaggtgcagatagactcaccttt

SEQ ID NO: 31777 - DNA, 36 bp, synthetic construct
  source 1..36: mol_type = other DNA
tgtgcctggagtctcctggcagacacccagtacttt

SEQ ID NO: 31778 - DNA, 45 bp, synthetic construct
  source 1..45: mol_type = other DNA
tgcattgtgactgacgactcttctggcagctggcaactcatcttt

SEQ ID NO: 31779 - DNA, 45 bp, synthetic construct; identical to SEQ ID NO: 31563
  source 1..45: mol_type = other DNA

SEQ ID NO: 31780 - DNA, 36 bp, synthetic construct
  source 1..36: mol_type = other DNA
tgtgggacggctggcagtggtggaaaactcactttg

SEQ ID NO: 31781 - DNA, 42 bp, synthetic construct
  source 1..42: mol_type = other DNA
tgtggtgcaggtgacagggccttctcctatgaacagtacttc

SEQ ID NO: 31782 - DNA, 36 bp, synthetic construct
  source 1..36: mol_type = other DNA
tgcgctctcttcaacatgggctacaaacttaccttc

SEQ ID NO: 31783 - DNA, 48 bp, synthetic construct
  source 1..48: mol_type = other DNA
tgtggtgctagggatttggacaggggccataattcgcccctctacttt

SEQ ID NO: 31784 - DNA, 39 bp, synthetic construct
  source 1..39: mol_type = other DNA
tgtgcagcaagcatggactatgcaaacaagatgatcttt

SEQ ID NO: 31785 - DNA, 39 bp, synthetic construct
  source 1..39: mol_type = other DNA
tgtgccagcagtatacggggaaacacagaagtcttcttt

SEQ ID NO: 31786 - DNA, 39 bp, synthetic construct
  source 1..39: mol_type = other DNA
tgtgctgctgataactatggaaatgagaaaataactttt

SEQ ID NO: 31787 - DNA, 39 bp, synthetic construct; identical to SEQ ID NO: 31695
  source 1..39: mol_type = other DNA

SEQ ID NO: 31788 - DNA, 48 bp, synthetic construct; identical to SEQ ID NO: 31696
  source 1..48: mol_type = other DNA

SEQ ID NO: 31789 - DNA, 45 bp, synthetic construct
  source 1..45: mol_type = other DNA
tgcacctgcagtgcggacaggggctataattcgcccctctacttt

SEQ ID NO: 31790 - DNA, 51 bp, synthetic construct
  source 1..51: mol_type = other DNA
tgcgctctctcggaacggggcagtggaggcagcaattacaaactgacattt

SEQ ID NO: 31791 - DNA, 33 bp, synthetic construct
  source 1..33: mol_type = other DNA
tgcacctgcagtgctccagacacccagtacttt

SEQ ID NO: 31792 - DNA, 45 bp, synthetic construct
  source 1..45: mol_type = other DNA
tgtgctctgagcatgaggggctacagcaacaacagacttactttg

SEQ ID NO: 31793 - DNA, 48 bp, synthetic construct
  source 1..48: mol_type = other DNA
tgcacctgcagtgcttcccgacagggaccgggaaatacgctctatttt

SEQ ID NO: 31794 - DNA, 36 bp, synthetic construct
  source 1..36: mol_type = other DNA
tgtgctataggtgcgggttaccagaacttctatttt

SEQ ID NO: 31795 - DNA, 45 bp, synthetic construct
  source 1..45: mol_type = other DNA
tgtgccagcagccaagactggggggtctcctatgaacagtacttc

SEQ ID NO: 31796 - DNA, 39 bp, synthetic construct
  source 1..39: mol_type = other DNA
tgtgcagcagatgacacaaatgcttacaaagtcatcttt

SEQ ID NO: 31797 - DNA, 48 bp, synthetic construct
  source 1..48: mol_type = other DNA
tgtgccagcagccaagataggacttctagtgcagaaacgctgtatttt

SEQ ID NO: 31798 - DNA, 45 bp, synthetic construct
  source 1..45: mol_type = other DNA
tgtgctttgagtgatctcccaggaggtgcagatagactcaccttt

SEQ ID NO: 31799 - DNA, 39 bp, synthetic construct
  source 1..39: mol_type = other DNA
tgtgccagcagccaagtggggggacaggctccgcttttt

SEQ ID NO: 31800 - DNA, 42 bp, synthetic construct
  source 1..42: mol_type = other DNA
tgtgctctgggtgatccaggcaatactagaaaactcatcttt

SEQ ID NO: 31801 - DNA, 42 bp, synthetic construct
  source 1..42: mol_type = other DNA
tgtgccagcagccccgggacagggggccgcgaacagtacttc

SEQ ID NO: 31802 - DNA, 42 bp, synthetic construct
  source 1..42: mol_type = other DNA
tgtgctttgagcccccataactatgcccagggattaaccttc

SEQ ID NO: 31803 - DNA, 51 bp, synthetic construct
  source 1..51: mol_type = other DNA
tgtgccagcagccgggactgggggggcgcgaaccaagacacccagtacttt

SEQ ID NO: 31804 - DNA, 33 bp, synthetic construct
  source 1..33: mol_type = other DNA
tgtgctctgggtggaaatgagaaaataactttt

SEQ ID NO: 31805 - DNA, 45 bp, synthetic construct
  source 1..45: mol_type = other DNA
tgtgccagcaggggggactgggggggccgtgggcagctctacttt

SEQ ID NO: 31806 - DNA, 48 bp, synthetic construct
  source 1..48: mol_type = other DNA
tgtgctctggggcccatggctactggaggcaataataagctgactttt

SEQ ID NO: 31807 - DNA, 45 bp, synthetic construct
  source 1..45: mol_type = other DNA
tgtgcaagcagcccagggggggcggatagagacacccagtacttt

SEQ ID NO: 31808 - DNA, 39 bp, synthetic construct
  source 1..39: mol_type = other DNA
tgtgctgtgagcctcagtgcagggaacaagctaactttt

SEQ ID NO: 31809 - DNA, 42 bp, synthetic construct
  source 1..42: mol_type = other DNA
tgtgcaagcagctcgacaggggcaaacacagaagtcttcttt

SEQ ID NO: 31810 - DNA, 42 bp, synthetic construct; identical to SEQ ID NO: 31476
  source 1..42: mol_type = other DNA

SEQ ID NO: 31811 - DNA, 45 bp, synthetic construct
  source 1..45: mol_type = other DNA
tgtgcaagcagcttagaggacactgcaaactccgactacaccttc

SEQ ID NO: 31812 - DNA, 42 bp, synthetic construct
  source 1..42: mol_type = other DNA
tgtgctgtgagcatgggctacagcaacaacagacttactttg

SEQ ID NO: 31813 - DNA, 33 bp, synthetic construct; identical to SEQ ID NO: 31473
  source 1..33: mol_type = other DNA

SEQ ID NO: 31814 - DNA, 39 bp, synthetic construct
  source 1..39: mol_type = other DNA
tgtgcagcaagcatttctaattacaacgtgctttacttc

SEQ ID NO: 31815 - DNA, 42 bp, synthetic construct
  source 1..42: mol_type = other DNA
tgtgccagcagtttcggggggagtgcagaaacgctgtatttt

SEQ ID NO: 31816 - DNA, 42 bp, synthetic construct
  source 1..42: mol_type = other DNA
tgtatcctggggcttaatacaggaaactacaaatacgtcttt

SEQ ID NO: 31817 - DNA, 51 bp, synthetic construct
  source 1..51: mol_type = other DNA
tgtgccagcagtttgcagggagggaccatttccaacgaaagattatttttc

SEQ ID NO: 31818 - DNA, 39 bp, synthetic construct
  source 1..39: mol_type = other DNA
tgtgcagtgaccccggactatgcaaacaagatgatcttt

SEQ ID NO: 31819 - DNA, 48 bp, synthetic construct
  source 1..48: mol_type = other DNA
tgtgccagcagttttgggacagggggcaacaccgggcagctctacttt

SEQ ID NO: 31820 - DNA, 39 bp, synthetic construct; identical to SEQ ID NO: 31530
  source 1..39: mol_type = other DNA

SEQ ID NO: 31821 - DNA, 42 bp, synthetic construct; identical to SEQ ID NO: 31635
  source 1..42: mol_type = other DNA

SEQ ID NO: 31822 - DNA, 48 bp, synthetic construct
  source 1..48: mol_type = other DNA
tgtgctctctgggagctggcaggttcagccttagggaggctgcatttt

SEQ ID NO: 31823 - DNA, 45 bp, synthetic construct
  source 1..45: mol_type = other DNA
tgtgccagcagccaagaaagggttaacaaccaggctccgcttttt

SEQ ID NO: 31824 - DNA, 36 bp, synthetic construct
  source 1..36: mol_type = other DNA
tgtgttctgggagataacaacaatgccccacgattt

SEQ ID NO: 31825 - DNA, 48 bp, synthetic construct
  source 1..48: mol_type = other DNA
tgtgccagcagccaagaaagtggtttaatacaagacacccagtacttt

SEQ ID NO: 31826 - DNA, 39 bp, synthetic construct
  source 1..39: mol_type = other DNA
tgtgctatagatccctctggcagctggcaactcatcttt

SEQ ID NO: 31827 - DNA, 36 bp, synthetic construct
  source 1..36: mol_type = other DNA
tgtgccagcagccaagagttatatgaacagtacttc

SEQ ID NO: 31828 - DNA, 39 bp, synthetic construct
  source 1..39: mol_type = other DNA
tgtgctgttacctcaggaggaaactacaaacctacgttt

SEQ ID NO: 31829 - DNA, 45 bp, synthetic construct
  source 1..45: mol_type = other DNA
tgtgccagcagccaagatacaggctacaacgaaagattatttttc

SEQ ID NO: 31830 - DNA, 39 bp, synthetic construct
  source 1..39: mol_type = other DNA
tgtgctatgactaacagtgcagggaacaagctaactttt

SEQ ID NO: 31831 - DNA, 51 bp, synthetic construct
  source 1..51: mol_type = other DNA
tgtgccagcagccaagtccccaggggtcaggcaaacacagaagtcttcttt

SEQ ID NO: 31832 - DNA, 36 bp, synthetic construct
  source 1..36: mol_type = other DNA
tgtgccaatacaggaggtgcagatagactcaccttt

SEQ ID NO: 31833 - DNA, 45 bp, synthetic construct
  source 1..45: mol_type = other DNA
tgtgccagcagccagggactgggggactcctatgaacagtacttc

SEQ ID NO: 31834 - DNA, 39 bp, synthetic construct
  source 1..39: mol_type = other DNA
tgcgctctgagtgacaccaatacaggcaaattaaccttt

SEQ ID NO: 31835 - DNA, 42 bp, synthetic construct
  source 1..42: mol_type = other DNA
tgtgccagcagcacgacagggggtgcagaaacgctgtatttt

SEQ ID NO: 31836 - DNA, 36 bp, synthetic construct
  source 1..36: mol_type = other DNA
tgtgctctttcctacatgggctacaaacttaccttc

SEQ ID NO: 31837 - DNA, 39 bp, synthetic construct
  source 1..39: mol_type = other DNA
tgtgccagcagccaacgggacacagacacccagtacttt

SEQ ID NO: 31838 - DNA, 48 bp, synthetic construct
  source 1..48: mol_type = other DNA
tgtgcagcaagccttatgacaactgccagtttggggaaactgcagttt

SEQ ID NO: 31839 - DNA, 42 bp, synthetic construct
  source 1..42: mol_type = other DNA
tgtgccagcagcctgggacagggggatgctgagcagttcttc

SEQ ID NO: 31840 - DNA, 45 bp, synthetic construct
  source 1..45: mol_type = other DNA
tgcgcagtcagcgtcttatctggtagcttcaataagttgaccttt

SEQ ID NO: 31841 - DNA, 45 bp, synthetic construct
  source 1..45: mol_type = other DNA
tgtgccagcagctcggggactggggggggcgctgagcagttcttc

SEQ ID NO: 31842 - DNA, 42 bp, synthetic construct
  source 1..42: mol_type = other DNA
tgtgcagcaaggttatctggtagcttcaataagttgaccttt

SEQ ID NO: 31843 - DNA, 33 bp, synthetic construct
  source 1..33: mol_type = other DNA
tgtgccagcagctctctctatgaacagtacttc

SEQ ID NO: 31844 - DNA, 39 bp, synthetic construct
  source 1..39: mol_type = other DNA
tgtgctttgggctatacaggaaactacaaatacgtcttt

SEQ ID NO: 31845 - DNA, 39 bp, synthetic construct; identical to SEQ ID NO: 26531
  source 1..39: mol_type = other DNA

SEQ ID NO: 31846 - DNA, 36 bp, synthetic construct
  source 1..36: mol_type = other DNA
tgtgcagcttcttccaataccaacaaagtcgtcttt

SEQ ID NO: 31847 - DNA, 39 bp, synthetic construct
  source 1..39: mol_type = other DNA
tgtgccagcagggacaggggtgaccaggctccgcttttt

SEQ ID NO: 31848 - DNA, 33 bp, synthetic construct
  source 1..33: mol_type = other DNA
tgtgcagtgagccctctcaacaaagtcgtcttt

SEQ ID NO: 31849 - DNA, 42 bp, synthetic construct
  source 1..42: mol_type = other DNA
tgtgccagcagttcagggggcaacaccgggcagctctacttt

SEQ ID NO: 31850 - DNA, 45 bp, synthetic construct
  source 1..45: mol_type = other DNA
tgtgctgcaagtggggcaggcactgggagtaacaggctcactttt

SEQ ID NO: 31851 - DNA, 39 bp, synthetic construct
  source 1..39: mol_type = other DNA
tgtgccagcagttccgggacattaacagaagtcttcttt

SEQ ID NO: 31852 - DNA, 36 bp, synthetic construct
  source 1..36: mol_type = other DNA
tgtgctatgcattctggcagctggcaactcatcttt

SEQ ID NO: 31853 - DNA, 42 bp, synthetic construct
  source 1..42: mol_type = other DNA
tgtgccagcggtcccgggacagcaaactccgactacaccttc

SEQ ID NO: 31854 - DNA, 39 bp, synthetic construct; identical to SEQ ID NO: 31492
  source 1..39: mol_type = other DNA

SEQ ID NO: 31855 - DNA, 42 bp, synthetic construct
  source 1..42: mol_type = other DNA
tgtgccagcggtgaaaatggggggcaagacacccagtacttt

SEQ ID NO: 31856 - DNA, 45 bp, synthetic construct
  source 1..45: mol_type = other DNA
tgtgctctgagccccgcatcttctggcagctggcaactcatcttt

SEQ ID NO: 31857 - DNA, 42 bp, synthetic construct
  source 1..42: mol_type = other DNA
tgtgccagcggtgaagactgggggggcgccacccagtacttt

SEQ ID NO: 31858 - DNA, 48 bp, synthetic construct
  source 1..48: mol_type = other DNA
tgtgctatgagagagggggctactggaggcaataataagctgactttt

SEQ ID NO: 31859 - DNA, 39 bp, synthetic construct
  source 1..39: mol_type = other DNA
tgtgccagcggtgagggggggcaagacacccagtacttt

SEQ ID NO: 31860 - DNA, 39 bp, synthetic construct
  source 1..39: mol_type = other DNA
tgtgctatgagagggaatagcaataacagaatcttcttt

SEQ ID NO: 31861 - DNA, 42 bp, synthetic construct; identical to SEQ ID NO: 31739
  source 1..42: mol_type = other DNA

SEQ ID NO: 31862 - DNA, 54 bp, synthetic construct
  source 1..54: mol_type = other DNA
tgtgctttggcttcgagaattaattctggaggaagcaatgcaaagctaaccttc

SEQ ID NO: 31863 - DNA, 39 bp, synthetic construct
  source 1..39: mol_type = other DNA
tgtgccagcggtgcaggttctggaaatacgctctatttt

SEQ ID NO: 31864 - DNA, 39 bp, synthetic construct
  source 1..39: mol_type = other DNA
tgtgcagcaagcaagattgatgcaaacaagatgatcttt

SEQ ID NO: 31865 - DNA, 39 bp, synthetic construct; identical to SEQ ID NO: 31679
  source 1..39: mol_type = other DNA

SEQ ID NO: 31866 - DNA, 48 bp, synthetic construct
  source 1..48: mol_type = other DNA
tgtatcctgagagtttcccagcaaggcactgggtctaagctgtcattt

SEQ ID NO: 31867 - DNA, 42 bp, synthetic construct
  source 1..42: mol_type = other DNA
tgtgccagcggtggagaacagggggcgtatgaacagtacttc

SEQ ID NO: 31868 - DNA, 42 bp, synthetic construct
  source 1..42: mol_type = other DNA
tgtgctatgaacagtggaggcagcaattacaaactgacattt

SEQ ID NO: 31869 - DNA, 42 bp, synthetic construct
  source 1..42: mol_type = other DNA
tgtgccagcaaactgggatttaaccaagacacccagtacttt

SEQ ID NO: 31870 - DNA, 51 bp, synthetic construct; identical to SEQ ID NO: 26554
  source 1..51: mol_type = other DNA

SEQ ID NO: 31871 - DNA, 36 bp, synthetic construct
  source 1..36: mol_type = other DNA
tgtgccagcagtcaggggtcggaggctccgcttttt

SEQ ID NO: 31872 - DNA, 42 bp, synthetic construct
  source 1..42: mol_type = other DNA
tgtgctatgagagaggtcgagggaggcagagctctgatattt

SEQ ID NO: 31873 - DNA, 39 bp, synthetic construct
  source 1..39: mol_type = other DNA
tgtgccagcagtgatgcaagacaatatgaacagtacttc

SEQ ID NO: 31874 - DNA, 36 bp, synthetic construct
  source 1..36: mol_type = other DNA
tgctcagcaatgggcaacaacaatgccccacgattt

SEQ ID NO: 31875 - DNA, 42 bp, synthetic construct
  source 1..42: mol_type = other DNA
tgtgccagcagtgatgcagataaccaagacacccagtacttt

SEQ ID NO: 31876 - DNA, 42 bp, synthetic construct
  source 1..42: mol_type = other DNA
tgtgctgctgagccccaccagggaggcagagctctgatattt

SEQ ID NO: 31877 - DNA, 36 bp, synthetic construct
  source 1..36: mol_type = other DNA
tgtgccagcagtgatgtaaacacagaagtcttcttt

SEQ ID NO: 31878 - DNA, 42 bp, synthetic construct
  source 1..42: mol_type = other DNA
tgtgcagcagctgcatcttctggcagctggcaactcatcttt

SEQ ID NO: 31879 - DNA, 42 bp, synthetic construct
  source 1..42: mol_type = other DNA
tgtgccagcagtgggacaggggcaaactccgactacaccttc

SEQ ID NO: 31880 - DNA, 36 bp, synthetic construct
  source 1..36: mol_type = other DNA
tgcgcagtcagggattctgggacttaccagaggttt

SEQ ID NO: 31881 - DNA, 42 bp, synthetic construct
  source 1..42: mol_type = other DNA
tgtgccagcagtggggacaatagtcaaaacaccttgtacttt

SEQ ID NO: 31882 - DNA, 42 bp, synthetic construct
  source 1..42: mol_type = other DNA
tgtgttctggtgacaactgccagtttggggaaactgcagttt

SEQ ID NO: 31883 - DNA, 39 bp, synthetic construct
  source 1..39: mol_type = other DNA
tgtgccagcagggacagggctaattcgcccctctacttt

SEQ ID NO: 31884 - DNA, 42 bp, synthetic construct; identical to SEQ ID NO: 31476
  source 1..42: mol_type = other DNA

SEQ ID NO: 31885 - DNA, 45 bp, synthetic construct
  source 1..45: mol_type = other DNA
tgtgccagcagggcagggggagagagtgcagaaacgctgtatttt

SEQ ID NO: 31886 - DNA, 33 bp, synthetic construct
  source 1..33: mol_type = other DNA
tgtgcagggaacatgggctacaaacttaccttc

SEQ ID NO: 31887 - DNA, 48 bp, synthetic construct
  source 1..48: mol_type = other DNA
tgtgccagcagtgacaggggacagggaaccaacgaaagattatttttc

SEQ ID NO: 31888 - DNA, 42 bp, synthetic construct
  source 1..42: mol_type = other DNA
tgtgctatgagagggcaaggagggtctgcgaagctcatcttt

SEQ ID NO: 31889 - DNA, 45 bp, synthetic construct
  source 1..45: mol_type = other DNA
tgtgccagcagtgaccgggacacttccaacgaaagattatttttc

SEQ ID NO: 31890 - DNA, 39 bp, synthetic construct
  source 1..39: mol_type = other DNA
tgcgcagtcagagacacaaatgcttacaaagtcatcttt

SEQ ID NO: 31891 - DNA, 45 bp, synthetic construct
  source 1..45: mol_type = other DNA
tgtgccagcagtgaccgggacagtctcaacgaaagattatttttc

SEQ ID NO: 31892 - DNA, 36 bp, synthetic construct
  source 1..36: mol_type = other DNA
tgtgctgcccataatgcaggtgccaagctcacattc

SEQ ID NO: 31893 - DNA, 45 bp, synthetic construct
  source 1..45: mol_type = other DNA
tgtgccagcagtgatgcagcgagaaacaccgggcagctctacttt

SEQ ID NO: 31894 - DNA, 51 bp, synthetic construct
  source 1..51: mol_type = other DNA
tgtgcagcaagttcgagggggggtcaaggagggtctgcgaagctcatcttt

SEQ ID NO: 31895 - DNA, 42 bp, synthetic construct
  source 1..42: mol_type = other DNA
tgtgccagcagtggcactgggggggtagacacccagtacttt

SEQ ID NO: 31896 - DNA, 39 bp, synthetic construct
  source 1..39: mol_type = other DNA
tgtgcagattcaacttcaagtggccagaagctggttttt

SEQ ID NO: 31897 - DNA, 48 bp, synthetic construct
  source 1..48: mol_type = other DNA
tgtgccagcagtggcgactggggggctagtgcagaaacgctgtatttt

SEQ ID NO: 31898 - DNA, 42 bp, synthetic construct; identical to SEQ ID NO: 31476
  source 1..42: mol_type = other DNA

SEQ ID NO: 31899 - DNA, 45 bp, synthetic construct
  source 1..45: mol_type = other DNA
tgtgctagcagtagtaggggtgcaaacaccgggcagctctacttt

SEQ ID NO: 31900 - DNA, 33 bp, synthetic construct
  source 1..33: mol_type = other DNA
tgcgcagcaggagagtctgcgaagctcatcttt

SEQ ID NO: 31901 - DNA, 45 bp, synthetic construct; identical to SEQ ID NO: 31899
  source 1..45: mol_type = other DNA

SEQ ID NO: 31902 - DNA, 36 bp, synthetic construct; identical to SEQ ID NO: 31494
  source 1..36: mol_type = other DNA

SEQ ID NO: 31903 - DNA, 42 bp, synthetic construct
  source 1..42: mol_type = other DNA
tgtgcctggagtcccgccgggggatctgctgagcagttcttc

SEQ ID NO: 31904 - DNA, 45 bp, synthetic construct
  source 1..45: mol_type = other DNA
tgtgcagcaagtaggacctcaggaggaaactacaaacctacgttt

SEQ ID NO: 31905 - DNA, 42 bp, synthetic construct
  source 1..42: mol_type = other DNA
tgtgcctggagtctaggatataacaaccaggctccgcttttt

SEQ ID NO: 31906 - DNA, 45 bp, synthetic construct
  source 1..45: mol_type = other DNA
tgtgctctgggtgatcgggtgaacatgggctacaaacttaccttc

SEQ ID NO: 31907 - DNA, 45 bp, synthetic construct; identical to SEQ ID NO: 31613
  source 1..45: mol_type = other DNA

SEQ ID NO: 31908 - DNA, 45 bp, synthetic construct
  source 1..45: mol_type = other DNA
tgtgctctctgggagctggggggtgcaggtgccaagctcacattc

SEQ ID NO: 31909 - DNA, 36 bp, synthetic construct
  source 1..36: mol_type = other DNA
tgtgcctggagtcttcttcacacagaagtcttcttt

SEQ ID NO: 31910 - DNA, 36 bp, synthetic construct
  source 1..36: mol_type = other DNA
tgtgcagcagaggatagcaactatcagttgatctgg

SEQ ID NO: 31911 - DNA, 36 bp, synthetic construct
  source 1..36: mol_type = other DNA
tgtggtgctagagacaggtttcaggctccgcttttt

SEQ ID NO: 31912 - DNA, 48 bp, synthetic construct
  source 1..48: mol_type = other DNA
tgcgcagtcagttggaacagtggaggcagcaattacaaactgacattt

SEQ ID NO: 31913 - DNA, 42 bp, synthetic construct
  source 1..42: mol_type = other DNA
tgtggtgctagggagggacaatccaacgaaagattatttttc

SEQ ID NO: 31914 - DNA, 45 bp, synthetic construct
  source 1..45: mol_type = other DNA
tgtgctgcaagtctttatgggagcagtggcaacaagctcatcttt

SEQ ID NO: 31915 - DNA, 39 bp, synthetic construct
  source 1..39: mol_type = other DNA
tgtgccagcagagtcaatagtcaaaacaccttgtacttt

SEQ ID NO: 31916 - DNA, 36 bp, synthetic construct
  source 1..36: mol_type = other DNA
tgtgctctggattataaccaggggaagcttatcttt

SEQ ID NO: 31917 - DNA, 39 bp, synthetic construct
  source 1..39: mol_type = other DNA
tgtgccagcagcatgggacagggaggcgaacagtacttc

SEQ ID NO: 31918 - DNA, 39 bp, synthetic construct
  source 1..39: mol_type = other DNA
tgtgcagcaagcggggactatgcccagggattaaccttc

SEQ ID NO: 31919 - DNA, 39 bp, synthetic construct
  source 1..39: mol_type = other DNA
tgtgccagcagtataagggacagctatgaacagtacttc

SEQ ID NO: 31920 - DNA, 39 bp, synthetic construct
  source 1..39: mol_type = other DNA
tgtgctgctgaacagtattctgggacttaccagaggttt

SEQ ID NO: 31921 - DNA, 33 bp, synthetic construct
  source 1..33: mol_type = other DNA
tgtgccagcagtatacaaaaagaagtcttcttt

SEQ ID NO: 31922 - DNA, 45 bp, synthetic construct
  source 1..45: mol_type = other DNA
tgtgcagcaaggctagcatcctcctccttcagcaagctggtgttt

SEQ ID NO: 31923 - DNA, 42 bp, synthetic construct
  source 1..42: mol_type = other DNA
tgtgccagcagtatagctgggggggactatgaacagtacttc

SEQ ID NO: 31924 - DNA, 48 bp, synthetic construct
  source 1..48: mol_type = other DNA
tgtgctctgagtgatcgcagtggaggcagcaattacaaactgacattt

SEQ ID NO: 31925 - DNA, 39 bp, synthetic construct
  source 1..39: mol_type = other DNA
tgtgccagcagtatagggtcaaactccgactacaccttc

SEQ ID NO: 31926 - DNA, 48 bp, synthetic construct
  source 1..48: mol_type = other DNA
tgcgcagtcagtctgaatactggaggactaagtggtaaattaacattc

SEQ ID NO: 31927 - DNA, 42 bp, synthetic construct
  source 1..42: mol_type = other DNA
tgtgccagcagtatatgggacaaccaagacacccagtacttt

SEQ ID NO: 31928 - DNA, 39 bp, synthetic construct
  source 1..39: mol_type = other DNA
tgtgctatgagagataactatgcccagggattaaccttc

SEQ ID NO: 31929 - DNA, 42 bp, synthetic construct
  source 1..42: mol_type = other DNA
tgtgccagcagtatcgggacagcctttgctgagcagttcttc

SEQ ID NO: 31930 - DNA, 48 bp, synthetic construct
  source 1..48: mol_type = other DNA
tgtgctctgagtgatgacagtggaggcagcaattacaaactgacattt

SEQ ID NO: 31931 - DNA, 42 bp, synthetic construct
  source 1..42: mol_type = other DNA
tgtgccagcagtatgggcagtagtcaaaacaccttgtacttt

SEQ ID NO: 31932 - DNA, 36 bp, synthetic construct
  source 1..36: mol_type = other DNA
tgcgcagtcgggaccaatacaggcaaattaaccttt

SEQ ID NO: 31933 - DNA, 36 bp, synthetic construct
  source 1..36: mol_type = other DNA
tgtgccagcagtatggggggagacacccagtacttt

SEQ ID NO: 31934 - DNA, 42 bp, synthetic construct
  source 1..42: mol_type = other DNA
tgtgctctttccttcatgtctaattacaacgtgctttacttc

SEQ ID NO: 31935 - DNA, 42 bp, synthetic construct
  source 1..42: mol_type = other DNA
tgtgccagcagtattaaggggagctatgctgagcagttcttc

SEQ ID NO: 31936 - DNA, 36 bp, synthetic construct
  source 1..36: mol_type = other DNA
tgtgctctgacttccaataccgacaaagtcgtcttt

SEQ ID NO: 31937 - DNA, 45 bp, synthetic construct
  source 1..45: mol_type = other DNA
tgtgccagcagtcccaggggaacaaacaccgggcagctctacttt

SEQ ID NO: 31938 - DNA, 36 bp, synthetic construct
  source 1..36: mol_type = other DNA
tgtgttttgaggccgggttaccagaacttctatttt

SEQ ID NO: 31939 - DNA, 51 bp, synthetic construct
  source 1..51: mol_type = other DNA
tgtgccagcagtgtagggactgggggggctagtgcagaaacgctgtatttt

SEQ ID NO: 31940 - DNA, 39 bp, synthetic construct
  source 1..39: mol_type = other DNA
tgtgcagcaagttactacagcaacaacagacttactttg

SEQ ID NO: 31941 - DNA, 42 bp, synthetic construct
  source 1..42: mol_type = other DNA
tgcacctgcagtatcgggggagggtcctatgaacagtacttc

SEQ ID NO: 31942 - DNA, 45 bp, synthetic construct
  source 1..45: mol_type = other DNA
tgtgctgtgagcatgggggcaggcaatactagaaaactcatcttt

SEQ ID NO: 31943 - DNA, 42 bp, synthetic construct
  source 1..42: mol_type = other DNA
tgcacctgcagtgaggggacagggccctatgaacagtacttc

SEQ ID NO: 31944 - DNA, 51 bp, synthetic construct
  source 1..51: mol_type = other DNA
tgtgctatgagagagggcctccagcaaggcactgggtctaagctgtcattt

SEQ ID NO: 31945 - DNA, 48 bp, synthetic construct
  source 1..48: mol_type = other DNA
tgcacctgcagtgcaagcccgacagggggtaattcgcccctctacttt

SEQ ID NO: 31946 - DNA, 45 bp, synthetic construct
  source 1..45: mol_type = other DNA
tgtgcagctagtgagcctaacagtgcagggaacaagctaactttt

SEQ ID NO: 31947 - DNA, 48 bp, synthetic construct; identical to SEQ ID NO: 31945
  source 1..48: mol_type = other DNA

SEQ ID NO: 31948 - DNA, 42 bp, synthetic construct
  source 1..42: mol_type = other DNA
tgtgctgctggttatgggagcagtggcaacaagctcatcttt

SEQ ID NO: 31949 - DNA, 36 bp, synthetic construct
  source 1..36: mol_type = other DNA
tgcacctgcagtgcagatccagaaacgctgtatttt

SEQ ID NO: 31950 - DNA, 45 bp, synthetic construct
  source 1..45: mol_type = other DNA
tgtgctctgagtgatcggggttcagccttagggaggctgcatttt

SEQ ID NO: 31951 - DNA, 48 bp, synthetic construct
  source 1..48: mol_type = other DNA
tgcacctgcagtgcaggcactccgggacagggcacagaagtcttcttt

SEQ ID NO: 31952 - DNA, 42 bp, synthetic construct
  source 1..42: mol_type = other DNA
tgtgcagtgttagcatcctcctccttcagcaagctggtgttt

SEQ ID NO: 31953 - DNA, 33 bp, synthetic construct; identical to SEQ ID NO: 31791
  source 1..33: mol_type = other DNA

SEQ ID NO: 31954 - DNA, 48 bp, synthetic construct
  source 1..48: mol_type = other DNA
tgtgctgtgagcgcggacagtggaggcagcaattacaaactgacattt

SEQ ID NO: 31955 - DNA, 45 bp, synthetic construct
  source 1..45: mol_type = other DNA
tgtgccagcagcaaacagggggcagtcaccgggcagctctacttt

SEQ ID NO: 31956 - DNA, 48 bp, synthetic construct
  source 1..48: mol_type = other DNA
tgtatcctgagagttatgcagcaaggcactgggtctaagctgtcattt

SEQ ID NO: 31957 - DNA, 48 bp, synthetic construct
  source 1..48: mol_type = other DNA
tgtgccagcagccaaacccaggggggttctggaaatacgctctatttt

SEQ ID NO: 31958 - DNA, 42 bp, synthetic construct
  source 1..42: mol_type = other DNA
tgtgctgtgagcgcaaactatggaaatgagaaaataactttt

SEQ ID NO: 31959 - DNA, 45 bp, synthetic construct
  source 1..45: mol_type = other DNA
tgtgccagcagccaaaggacttttagtcaaaacaccttgtacttt

SEQ ID NO: 31960 - DNA, 42 bp, synthetic construct
  source 1..42: mol_type = other DNA
tgcgcagtcagtgaggcagaaggtgcagatagactcaccttt

SEQ ID NO: 31961 - DNA, 42 bp, synthetic construct
  source 1..42: mol_type = other DNA
tgtgccagcagccaagaaacagggatcacagaagtcttcttt

SEQ ID NO: 31962 - DNA, 42 bp, synthetic construct
  source 1..42: mol_type = other DNA
tgtgctctggggctgaacacgggttaccagaacttctatttt

SEQ ID NO: 31963 - DNA, 42 bp, synthetic construct
  source 1..42: mol_type = other DNA
tgtgccagcagccaagaactggcggaagacacccagtacttt

SEQ ID NO: 31964 - DNA, 39 bp, synthetic construct
  source 1..39: mol_type = other DNA
tgtgctctggggatgtctaattacaacgtgctttacttc

SEQ ID NO: 31965 - DNA, 36 bp, synthetic construct
  source 1..36: mol_type = other DNA
tgtgccagcagccaagaccaagacacccagtacttt

SEQ ID NO: 31966 - DNA, 39 bp, synthetic construct
  source 1..39: mol_type = other DNA
tgtgctgctgattcctcctccttcagcaagctggtgttt

SEQ ID NO: 31967 - DNA, 45 bp, synthetic construct
  source 1..45: mol_type = other DNA
tgtgccagcagccaagaccctggggcgcaagacacccagtacttt

SEQ ID NO: 31968 - DNA, 42 bp, synthetic construct; identical to SEQ ID NO: 31488
  source 1..42: mol_type = other DNA

SEQ ID NO: 31969 - DNA, 42 bp, synthetic construct
  source 1..42: mol_type = other DNA
tgtgccagcagccaagacgcgggggcagaaacgctgtatttt

SEQ ID NO: 31970 - DNA, 36 bp, synthetic construct
  source 1..36: mol_type = other DNA
tgtgcagtgaggggctatgcccagggattaaccttc

SEQ ID NO: 31971 - DNA, 45 bp, synthetic construct
  source 1..45: mol_type = other DNA
tgtgccagcagccaagagactgggggtgcagaaacgctgtatttt

SEQ ID NO: 31972 - DNA, 36 bp, synthetic construct
  source 1..36: mol_type = other DNA
tgtgctctgagttctaacaataacagaatcttcttt

SEQ ID NO: 31973 - DNA, 45 bp, synthetic construct
  source 1..45: mol_type = other DNA
tgtgccagcagccaagaggggggagcaaacacagaagtcttcttt

SEQ ID NO: 31974 - DNA, 48 bp, synthetic construct
  source 1..48: mol_type = other DNA
tgtgctgtgagcgcccttacatcctcctccttcagcaagctggtgttt

SEQ ID NO: 31975 - DNA, 42 bp, synthetic construct
  source 1..42: mol_type = other DNA
tgtgccagcagccaagatactgggggggctgaacagtacttc

SEQ ID NO: 31976 - DNA, 45 bp, synthetic construct
  source 1..45: mol_type = other DNA
tgcgcagcaggtggcagtggaggcagcaattacaaactgacattt

SEQ ID NO: 31977 - DNA, 45 bp, synthetic construct
  source 1..45: mol_type = other DNA
tgtgccagcagccaagatgactggggggtctatgaacagtacttc

SEQ ID NO: 31978 - DNA, 51 bp, synthetic construct
  source 1..51: mol_type = other DNA
tgtgctatgagagagggcggcagtggaggcagcaattacaaactgacattt

SEQ ID NO: 31979 - DNA, 51 bp, synthetic construct
  source 1..51: mol_type = other DNA
tgtgccagcagccaagatgggacagggttttctggaaatacgctctatttt

SEQ ID NO: 31980 - DNA, 39 bp, synthetic construct
  source 1..39: mol_type = other DNA
tgtgctctgggctcacaggttgtggggcagctcactttc

SEQ ID NO: 31981 - DNA, 42 bp, synthetic construct
  source 1..42: mol_type = other DNA
tgtgccagcagccaagattcacaaatctatgaacagtacttc

SEQ ID NO: 31982 - DNA, 42 bp, synthetic construct
  source 1..42: mol_type = other DNA
tgtgctctggttgactcaggaggaaactacaaacctacgttt

SEQ ID NO: 31983 - DNA, 45 bp, synthetic construct
  source 1..45: mol_type = other DNA
tgtgccagcagccaagatttgggtagtgcagaaacgctgtatttt

SEQ ID NO: 31984 - DNA, 42 bp, synthetic construct
  source 1..42: mol_type = other DNA
tgtgctatagggagtggaggaagcaatgcaaagctaaccttc

SEQ ID NO: 31985 - DNA, 48 bp, synthetic construct
  source 1..48: mol_type = other DNA
tgtgccagcagccaaggactggggggtagtcaaaacaccttgtacttt

SEQ ID NO: 31986 - DNA, 42 bp, synthetic construct
  source 1..42: mol_type = other DNA
tgtgctgtgacctttacaggaggtgcagatagactcaccttt

SEQ ID NO: 31987 - DNA, 48 bp, synthetic construct; identical to SEQ ID NO: 31985
  source 1..48: mol_type = other DNA

SEQ ID NO: 31988 - DNA, 42 bp, synthetic construct
  source 1..42: mol_type = other DNA
tgtgctctggcccctacagaaggtgcagatagactcaccttt

SEQ ID NO: 31989 - DNA, 45 bp, synthetic construct
  source 1..45: mol_type = other DNA
tgtgccagcagccaagggacagggggcgacgaaagattatttttc

SEQ ID NO: 31990 - DNA, 39 bp, synthetic construct
  source 1..39: mol_type = other DNA
tgtgctctgaggagttccaataccgacaaagtcgtcttt

SEQ ID NO: 31991 - DNA, 42 bp, synthetic construct
  source 1..42: mol_type = other DNA
tgtgccagcagccaagggactgggacctatgaacagtacttc

SEQ ID NO: 31992 - DNA, 42 bp, synthetic construct; identical to SEQ ID NO: 31476
  source 1..42: mol_type = other DNA

SEQ ID NO: 31993 - DNA, 45 bp, synthetic construct
  source 1..45: mol_type = other DNA
tgtgccagcagccaagggcaggttaactatgctgagcagttcttc

SEQ ID NO: 31994 - DNA, 48 bp, synthetic construct
  source 1..48: mol_type = other DNA
tgtgctatgagagatttcgcatcctcctccttcagcaagctggtgttt

SEQ ID NO: 31995 - DNA, 42 bp, synthetic construct
  source 1..42: mol_type = other DNA
tgtgccagcagccaaggggacaggagttcgcccctctacttt

SEQ ID NO: 31996 - DNA, 45 bp, synthetic construct
  source 1..45: mol_type = other DNA
tgtgcagctcctaacactggagctaacactggaaagctcacgttt

SEQ ID NO: 31997 - DNA, 42 bp, synthetic construct
  source 1..42: mol_type = other DNA
tgtgccagcagccaagtagggggaggggacaccttgtacttt

SEQ ID NO: 31998 - DNA, 39 bp, synthetic construct
  source 1..39: mol_type = other DNA
tgtgcagtgaggaacacgggttaccagaacttctatttt

SEQ ID NO: 31999 - DNA, 45 bp, synthetic construct
  source 1..45: mol_type = other DNA
tgtgccagcagccaagtcagggggagtcaaaacaccttgtacttt

SEQ ID NO: 32000 - DNA, 33 bp, synthetic construct
  source 1..33: mol_type = other DNA
tgtgctcacaccaatacaggcaaattaaccttt

SEQ ID NO: 32001 - DNA, 39 bp, synthetic construct
  source 1..39: mol_type = other DNA
tgtgccagcagccagacaacaaacacagaagtcttcttt

SEQ ID NO: 32002 - DNA, 39 bp, synthetic construct
  source 1..39: mol_type = other DNA
tgtgtggtgggcttttccaataccaacaaagtcgtcttt

SEQ ID NO: 32003 - DNA, 36 bp, synthetic construct
  source 1..36: mol_type = other DNA
tgtgccagcagccagacagggtatgaacagtacttc

SEQ ID NO: 32004 - DNA, 45 bp, synthetic construct
  source 1..45: mol_type = other DNA
tgtgcagcaagtgcaactggagctaacactggaaagctcacgttt

SEQ ID NO: 32005 - DNA, 51 bp, synthetic construct
  source 1..51: mol_type = other DNA
tgtgccagcagccataccccgacagggggcctctcctatgaacagtacttc

SEQ ID NO: 32006 - DNA, 36 bp, synthetic construct
  source 1..36: mol_type = other DNA
tgtgctctcgggggcactgggtctaagctgtcattt

SEQ ID NO: 32007 - DNA, 42 bp, synthetic construct
  source 1..42: mol_type = other DNA
tgtgccagcagcccagacaggggagacgaaagattatttttc

SEQ ID NO: 32008 - DNA, 36 bp, synthetic construct
  source 1..36: mol_type = other DNA
tgtgcccagtacacaaatgcttacaaagtcatcttt

SEQ ID NO: 32009 - DNA, 48 bp, synthetic construct
  source 1..48: mol_type = other DNA
tgtgccagcagccccactgggggggaaaacaccgggcagctctacttt

SEQ ID NO: 32010 - DNA, 39 bp, synthetic construct
  source 1..39: mol_type = other DNA
tgcgcagtcagatggacaaatgcttacaaagtcatcttt

SEQ ID NO: 32011 - DNA, 45 bp, synthetic construct
  source 1..45: mol_type = other DNA
tgtgccagcagcccccgggacaggggatatgctgagcagttcttc

SEQ ID NO: 32012 - DNA, 39 bp, synthetic construct
  source 1..39: mol_type = other DNA
tgcattgtgactgacagtggaggctataaagtggtcttt

SEQ ID NO: 32013 - DNA, 42 bp, synthetic construct
  source 1..42: mol_type = other DNA
tgtgccagcagcccgactgggggggcgcttgaacagtacttc

SEQ ID NO: 32014 - DNA, 48 bp, synthetic construct
  source 1..48: mol_type = other DNA
tgtgcactggagggccgagcatcctcctccttcagcaagctggtgttt

SEQ ID NO: 32015 - DNA, 48 bp, synthetic construct
  source 1..48: mol_type = other DNA
tgtgccagcagccctcagactgggggatcccaagacacccagtacttt

SEQ ID NO: 32016 - DNA, 45 bp, synthetic construct
  source 1..45: mol_type = other DNA
tgtgcagcaagcagggctggaggactaagtggtaaattaacattc

SEQ ID NO: 32017 - DNA, 45 bp, synthetic construct
  source 1..45: mol_type = other DNA
tgtgccagcagccggggactgggggtgcaagacacccagtacttt

SEQ ID NO: 32018 - DNA, 39 bp, synthetic construct
  source 1..39: mol_type = other DNA
tgtgctatggaacgaggcaatactagaaaactcatcttt

SEQ ID NO: 32019 - DNA, 45 bp, synthetic construct; identical to SEQ ID NO: 32017
  source 1..45: mol_type = other DNA

SEQ ID NO: 32020 - DNA, 42 bp, synthetic construct
  source 1..42: mol_type = other DNA
tgtgttttgagcgccgggacaaatgcttacaaactcatcttt

SEQ ID NO: 32021 - DNA, 42 bp, synthetic construct
  source 1..42: mol_type = other DNA
tgtgccagcagcggacaggtttctggaaatacgctctatttt

SEQ ID NO: 32022 - DNA, 33 bp, synthetic construct
  source 1..33: mol_type = other DNA
tgtgctgctgatagcaactatcagttgatctgg

SEQ ID NO: 32023 - DNA, 45 bp, synthetic construct
  source 1..45: mol_type = other DNA
tgtgccagcagctccgggacaggacccaacgaaagattatttttc

SEQ ID NO: 32024 - DNA, 42 bp, synthetic construct
  source 1..42: mol_type = other DNA
tgtgctatgagaggcggcaataacaacaatgccccacgattt

SEQ ID NO: 32025 - DNA, 42 bp, synthetic construct; identical to SEQ ID NO: 31809
  source 1..42: mol_type = other DNA

SEQ ID NO: 32026 - DNA, 39 bp, synthetic construct
  source 1..39: mol_type = other DNA
tgtgctgtgagcatggacatgggctacaaacttaccttc

SEQ ID NO: 32027 - DNA, 48 bp, synthetic construct
  source 1..48: mol_type = other DNA
tgtgcaagcagcttagagcctgggggtagtgcagaaacgctgtatttt

SEQ ID NO: 32028 - DNA, 42 bp, synthetic construct
  source 1..42: mol_type = other DNA
tgtgctactgatgcatcttctggcagctggcaactcatcttt

SEQ ID NO: 32029 - DNA, 48 bp, synthetic construct
  source 1..48: mol_type = other DNA
tgtgcaagcagcttagatagagggggcacaaactccgactacaccttc

SEQ ID NO: 32030 - DNA, 39 bp, synthetic construct
  source 1..39: mol_type = other DNA
tgtgctactgataactatggaaatgagaaaataactttt

SEQ ID NO: 32031 - DNA, 48 bp, synthetic construct
  source 1..48: mol_type = other DNA
tgtgcaagcagcttagatgacaggggaagatatgctgagcagttcttc

SEQ ID NO: 32032 - DNA, 42 bp, synthetic construct
  source 1..42: mol_type = other DNA
tgtgtttccctgactaacagtgcagggaacaagctaactttt

SEQ ID NO: 32033 - DNA, 45 bp, synthetic construct; identical to SEQ ID NO: 31489
  source 1..45: mol_type = other DNA

SEQ ID NO: 32034 - DNA, 39 bp, synthetic construct
  source 1..39: mol_type = other DNA
tgtgcagtgaaagcccacatgggctacaaacttaccttc

SEQ ID NO: 32035 - DNA, 45 bp, synthetic construct; identical to SEQ ID NO: 31489
  source 1..45: mol_type = other DNA

SEQ ID NO: 32036 - DNA, 45 bp, synthetic construct
  source 1..45: mol_type = other DNA
tgtgctgctgaggtctttggagtcagcaatgcatatctaaccttc

SEQ ID NO: 32037 - DNA, 42 bp, synthetic construct
  source 1..42: mol_type = other DNA
tgtgccagctctctgggacagggagaggatgaacagtacttc

SEQ ID NO: 32038 - DNA, 39 bp, synthetic construct
  source 1..39: mol_type = other DNA
tgtgcccgcccttacacgggttaccagaacttctatttt

SEQ ID NO: 32039 - DNA, 33 bp, synthetic construct
  source 1..33: mol_type = other DNA
tgtagttccagaaacggtgctgagcagttcttc

SEQ ID NO: 32040 - DNA, 42 bp, synthetic construct
  source 1..42: mol_type = other DNA
tgtgttttgagcggatcttctggcagctggcaactcatcttt

SEQ ID NO: 32041 - DNA, 36 bp, synthetic construct
  source 1..36: mol_type = other DNA
tgtagttctagctccagggagacagaagtcttcttt

SEQ ID NO: 32042 - DNA, 42 bp, synthetic construct
  source 1..42: mol_type = other DNA
tgtgctgcaagtccctactatggaaatgagaaaataactttt

SEQ ID NO: 32043 - DNA, 39 bp, synthetic construct
  source 1..39: mol_type = other DNA
tgtagttcttcaggggggggtcaaaacaccttgtacttt

SEQ ID NO: 32044 - DNA, 39 bp, synthetic construct
  source 1..39: mol_type = other DNA
tgtgcagtgggaggttcagccttagggaggctgcatttt

SEQ ID NO: 32045 - DNA, 36 bp, synthetic construct
  source 1..36: mol_type = other DNA
tgtgccagcagatcaaaaaactccgactacaccttc

SEQ ID NO: 32046 - DNA, 36 bp, synthetic construct
  source 1..36: mol_type = other DNA
tgtggggcatcttctggcagctggcaactcatcttt

SEQ ID NO: 32047 - DNA, 36 bp, synthetic construct; identical to SEQ ID NO: 32045
  source 1..36: mol_type = other DNA

SEQ ID NO: 32048 - DNA, 42 bp, synthetic construct; identical to SEQ ID NO: 31478
  source 1..42: mol_type = other DNA

SEQ ID NO: 32049 - DNA, 39 bp, synthetic construct
  source 1..39: mol_type = other DNA
tgtgccagcagccccagggaggactccgactacaccttc

SEQ ID NO: 32050 - DNA, 27 bp, synthetic construct
  source 1..27: mol_type = other DNA
tgtgctctgggtgacagaatcttcttt

SEQ ID NO: 32051 - DNA, 45 bp, synthetic construct
  source 1..45: mol_type = other DNA
tgtgccagcagccccctcaaatttagtgcagaaacgctgtatttt

SEQ ID NO: 32052 - DNA, 36 bp, synthetic construct
  source 1..36: mol_type = other DNA
tgtgctctgagtgatggaggctataaagtggtcttt

SEQ ID NO: 32053 - DNA, 45 bp, synthetic construct
  source 1..45: mol_type = other DNA
tgtgccagcagctccgggactgggggctatgctgagcagttcttc

SEQ ID NO: 32054 - DNA, 36 bp, synthetic construct
  source 1..36: mol_type = other DNA
tgtgctgcccattataaccaggggaagcttatcttt

SEQ ID NO: 32055 - DNA, 39 bp, synthetic construct
  source 1..39: mol_type = other DNA
tgtgccagcagcttcaacaggggcacagaagtcttcttt

SEQ ID NO: 32056 - DNA, 42 bp, synthetic construct
  source 1..42: mol_type = other DNA
tgcgcagccagggctactggaggcaataataagctgactttt

SEQ ID NO: 32057 - DNA, 42 bp, synthetic construct
  source 1..42: mol_type = other DNA
tgtgccagcaggccgacaggggtccaagacacccagtacttt

SEQ ID NO: 32058 - DNA, 45 bp, synthetic construct
  source 1..45: mol_type = other DNA
tgtgctctgggcctcagtggaggcagcaattacaaactgacattt

SEQ ID NO: 32059 - DNA, 39 bp, synthetic construct
  source 1..39: mol_type = other DNA
tgtgccagcagtcacctacagggctatgaacagtacttc

SEQ ID NO: 32060 - DNA, 42 bp, synthetic construct
  source 1..42: mol_type = other DNA
tgtgctctgagtgctagctatggaaatgagaaaataactttt

SEQ ID NO: 32061 - DNA, 39 bp, synthetic construct; identical to SEQ ID NO: 31483
  source 1..39: mol_type = other DNA

SEQ ID NO: 32062 - DNA, 39 bp, synthetic construct
  source 1..39: mol_type = other DNA
tgtgctctgtccatgtctaatgacaacgtgctttacttc

SEQ ID NO: 32063 - DNA, 39 bp, synthetic construct; identical to SEQ ID NO: 31483
  source 1..39: mol_type = other DNA

SEQ ID NO: 32064 - DNA, 39 bp, synthetic construct
  source 1..39: mol_type = other DNA
tgtgctctgaccatgtataattacaacgtgctttacttc

SEQ ID NO: 32065 - DNA, 54 bp, synthetic construct
  source 1..54: mol_type = other DNA
tgtgccagcagtcccctcggactgggggggcgcgatgcagaaacgctgtatttt

SEQ ID NO: 32066 - DNA, 48 bp, synthetic construct
  source 1..48: mol_type = other DNA
tgcgcagcaggtcctaattctggaggaagcaatgcaaagctaaccttc

SEQ ID NO: 32067 - DNA, 33 bp, synthetic construct; identical to SEQ ID NO: 31473
  source 1..33: mol_type = other DNA

SEQ ID NO: 32068 - DNA, 45 bp, synthetic construct; identical to SEQ ID NO: 31474
  source 1..45: mol_type = other DNA

SEQ ID NO: 32069 - DNA, 33 bp, synthetic construct; identical to SEQ ID NO: 31473
  source 1..33: mol_type = other DNA

SEQ ID NO: 32070 - DNA, 45 bp, synthetic construct
  source 1..45: mol_type = other DNA
tgtgcagctagtgagtcggcaggcaatactagaaaactcatcttt

SEQ ID NO: 32071 - DNA, 39 bp, synthetic construct
  source 1..39: mol_type = other DNA
tgtgccagcagtgcaggggcaaacacagaagtcttcttt

SEQ ID NO: 32072 - DNA, 51 bp, synthetic construct
  source 1..51: mol_type = other DNA
tgtgctctgggtgattctcacagtggaggcagcaattacaaactgacattt

SEQ ID NO: 32073 - DNA, 42 bp, synthetic construct
  source 1..42: mol_type = other DNA
tgtgccagcagtgcgggactgggggggttagaacagtacttc

SEQ ID NO: 32074 - DNA, 39 bp, synthetic construct
  source 1..39: mol_type = other DNA
tgtgctgcaagttacacgggttaccagaacttctatttt

SEQ ID NO: 32075 - DNA, 45 bp, synthetic construct
  source 1..45: mol_type = other DNA
tgtgccagcagtggggactgggggaaccaagacacccagtacttt

SEQ ID NO: 32076 - DNA, 45 bp, synthetic construct
  source 1..45: mol_type = other DNA
tgtgctatagatcgaatggacacgggttaccagaacttctatttt

SEQ ID NO: 32077 - DNA, 39 bp, synthetic construct
  source 1..39: mol_type = other DNA
tgtgccagcagttacaggatccaagacacccagtacttt

SEQ ID NO: 32078 - DNA, 42 bp, synthetic construct
  source 1..42: mol_type = other DNA
tgtgctttgagtgatgacacaaatgcttacaaagtcatcttt

SEQ ID NO: 32079 - DNA, 33 bp, synthetic construct
  source 1..33: mol_type = other DNA
tgtgccagcagttcagggggggaacagtacttc

SEQ ID NO: 32080 - DNA, 42 bp, synthetic construct
  source 1..42: mol_type = other DNA
tgtgctctgggaacaactgccagtttggggaaactgcagttt

SEQ ID NO: 32081 - DNA, 42 bp, synthetic construct
  source 1..42: mol_type = other DNA
tgtgccagcagttcctcggggagctcctatgaacagtacttc

SEQ ID NO: 32082 - DNA, 39 bp, synthetic construct
  source 1..39: mol_type = other DNA
tgtgctatgagagagggcggggataacagaatcttcttt

SEQ ID NO: 32083 - DNA, 42 bp, synthetic construct
  source 1..42: mol_type = other DNA
tgtgccagcagtttaagagagagtcaaaacaccttgtacttt

SEQ ID NO: 32084 - DNA, 54 bp, synthetic construct
  source 1..54: mol_type = other DNA
tgtgctatgagagaggggcggatgcagcaaggcactgggtctaagctgtcattt

SEQ ID NO: 32085 - DNA, 36 bp, synthetic construct
  source 1..36: mol_type = other DNA
tgtgccagcagtttcaaggaaccagaagtcttcttt

SEQ ID NO: 32086 - DNA, 42 bp, synthetic construct
  source 1..42: mol_type = other DNA
tgtgctactgccgcatcttctggcagctggcaactcatcttt

SEQ ID NO: 32087 - DNA, 36 bp, synthetic construct
  source 1..36: mol_type = other DNA
tgtgccagcagtttcaggggagacacccagtacttt

SEQ ID NO: 32088 - DNA, 42 bp, synthetic construct
  source 1..42: mol_type = other DNA
tgtgttttgagcgaatcttctggcagctggcaactcatcttt

SEQ ID NO: 32089 - DNA, 42 bp, synthetic construct
  source 1..42: mol_type = other DNA
tgtgccagcagtttcggggggggtcaaaacaccttgtacttt

SEQ ID NO: 32090 - DNA, 39 bp, synthetic construct
  source 1..39: mol_type = other DNA
tgtgcagcaagtgcggactatgcaaacaagatgatcttt

SEQ ID NO: 32091 - DNA, 42 bp, synthetic construct
  source 1..42: mol_type = other DNA
tgtgccagcagtttgaactggggggaagacacccagtacttt

SEQ ID NO: 32092 - DNA, 36 bp, synthetic construct
  source 1..36: mol_type = other DNA
tgtgctgatacaggaggtgcagatagactcaccttt

SEQ ID NO: 32093 - DNA, 42 bp, synthetic construct
  source 1..42: mol_type = other DNA
tgtgccagcagtttgcaggggacaaactccgactacaccttc

SEQ ID NO: 32094 - DNA, 42 bp, synthetic construct
  source 1..42: mol_type = other DNA
tgtgctctgggtctgactggaggcaataataagctgactttt

SEQ ID NO: 32095 - DNA, 39 bp, synthetic construct
  source 1..39: mol_type = other DNA
tgtgccagcagtttggggacaggagacaccttgtacttt

SEQ ID NO: 32096 - DNA, 39 bp, synthetic construct
  source 1..39: mol_type = other DNA
tgtgctctgggtgaaaatgcaggtgccaagctcacattc

SEQ ID NO: 32097 - DNA, 45 bp, synthetic construct
  source 1..45: mol_type = other DNA
tgtgccagcagttttacgacagggggtgcagaaacgctgtatttt

SEQ ID NO: 32098 - DNA, 36 bp, synthetic construct
  source 1..36: mol_type = other DNA
tgtgctgtgagcatgactgggacttaccagaggttt

SEQ ID NO: 32099 - DNA, 48 bp, synthetic construct; identical to SEQ ID NO: 31819
  source 1..48: mol_type = other DNA

SEQ ID NO: 32100 - DNA, 30 bp, synthetic construct
  source 1..30: mol_type = other DNA
tgtgctgcctatgcccagggattaaccttc

SEQ ID NO: 32101 - DNA, 36 bp, synthetic construct
  source 1..36: mol_type = other DNA
tgtgccagcagtttttggacaggggaagtcttcttt

SEQ ID NO: 32102 - DNA, 48 bp, synthetic construct
  source 1..48: mol_type = other DNA
tgtgctgtgagcgataattctggaggaagcaatgcaaagctaaccttc

SEQ ID NO: 32103 - DNA, 45 bp, synthetic construct
  source 1..45: mol_type = other DNA
tgtgctagcagcggggacaggggaaacaccgggcagctctacttt

SEQ ID NO: 32104 - DNA, 42 bp, synthetic construct
  source 1..42: mol_type = other DNA
tgtgctctgggtgatccttcaagtggccagaagctggttttt

SEQ ID NO: 32105 - DNA, 42 bp, synthetic construct
  source 1..42: mol_type = other DNA
tgtgctagcagctccgggacagggaactccgactacaccttc

SEQ ID NO: 32106 - DNA, 39 bp, synthetic construct
  source 1..39: mol_type = other DNA
tgtgcagtgagcatgtggggaggcagagctctgatattt

SEQ ID NO: 32107 - DNA, 48 bp, synthetic construct
  source 1..48: mol_type = other DNA
tgtgctagcagtcccgggactgggggggcggcagaaacgctgtatttt

SEQ ID NO: 32108 - DNA, 42 bp, synthetic construct
  source 1..42: mol_type = other DNA
tgtgctgtgagcatgtgggtccctgggtctaagctgtcattt

SEQ ID NO: 32109 - DNA, 36 bp, synthetic construct
  source 1..36: mol_type = other DNA
tgtgctagcagtggggggaacacagaagtcttcttt

SEQ ID NO: 32110 - DNA, 39 bp, synthetic construct
  source 1..39: mol_type = other DNA
tgtgctactgatgcttacatgggctacaaacttaccttc

SEQ ID NO: 32111 - DNA, 36 bp, synthetic construct; identical to SEQ ID NO: 32109
  source 1..36: mol_type = other DNA

SEQ ID NO: 32112 - DNA, 42 bp, synthetic construct; identical to SEQ ID NO: 31476
  source 1..42: mol_type = other DNA

SEQ ID NO: 32113 - DNA, 42 bp, synthetic construct
  source 1..42: mol_type = other DNA
tgtgctagcagtttaccagggggggcctatgaacagtacttc

SEQ ID NO: 32114 - DNA, 36 bp, synthetic construct
  source 1..36: mol_type = other DNA
tgtgcttccaaaggcactgggtctaagctgtcattt

SEQ ID NO: 32115 - DNA, 45 bp, synthetic construct
  source 1..45: mol_type = other DNA
tgtgctagcagtttagtgggcctctataattcgcccctctacttt

SEQ ID NO: 32116 - DNA, 42 bp, synthetic construct
  source 1..42: mol_type = other DNA
tgtgttctgggtggaacttcaagtggccagaagctggttttt

SEQ ID NO: 32117 - DNA, 45 bp, synthetic construct
  source 1..45: mol_type = other DNA
tgtgccagcagcaacagacagggacactatgctgagcagttcttc

SEQ ID NO: 32118 - DNA, 30 bp, synthetic construct
  source 1..30: mol_type = other DNA
tgtgggggcactgggtctaagctgtcattt

SEQ ID NO: 32119 - DNA, 33 bp, synthetic construct
  source 1..33: mol_type = other DNA
tgtgccagcagcagtcgccccgactacaccttc

SEQ ID NO: 32120 - DNA, 30 bp, synthetic construct
  source 1..30: mol_type = other DNA
tgtgcacccaataccgacaaagtcgtcttt

SEQ ID NO: 32121 - DNA, 45 bp, synthetic construct
  source 1..45: mol_type = other DNA
tgtgccagcagccaaaaactgggggggcgcgatgaacagtacttc

SEQ ID NO: 32122 - DNA, 42 bp, synthetic construct
  source 1..42: mol_type = other DNA
tgtgctactgatgccacacaggttgtggggcagctcactttc

SEQ ID NO: 32123 - DNA, 45 bp, synthetic construct
  source 1..45: mol_type = other DNA
tgtgccagcagccaaaggggcagggttggaaatacgctctatttt

SEQ ID NO: 32124 - DNA, 45 bp, synthetic construct
  source 1..45: mol_type = other DNA
tgtgctgtgagcatgcagcaaggcactgggtctaagctgtcattt

SEQ ID NO: 32125 - DNA, 45 bp, synthetic construct
  source 1..45: mol_type = other DNA
tgtgccagcagccaagaaacaagggcaaactccgactacaccttc

SEQ ID NO: 32126 - DNA, 39 bp, synthetic construct
  source 1..39: mol_type = other DNA
tgtgcagctgccaactatggaaatgagaaaataactttt

SEQ ID NO: 32127 - DNA, 45 bp, synthetic construct
  source 1..45: mol_type = other DNA
tgtgccagcagccaagaaaggacatccaacgaaagattatttttc

SEQ ID NO: 32128 - DNA, 42 bp, synthetic construct
  source 1..42: mol_type = other DNA
tgtgcaatgaatactggaggactaagtggtaaattaacattc

SEQ ID NO: 32129 - DNA, 45 bp, synthetic construct
  source 1..45: mol_type = other DNA
tgtgccagcagccaagaagagacaaacctatatgaacagtacttc

SEQ ID NO: 32130 - DNA, 39 bp, synthetic construct
  source 1..39: mol_type = other DNA
tgtgcagccctatttaatgcaggtgccaagctcacattc

SEQ ID NO: 32131 - DNA, 45 bp, synthetic construct
  source 1..45: mol_type = other DNA
tgtgccagcagccaagaatcggggagtcaaaacaccttgtacttt

SEQ ID NO: 32132 - DNA, 42 bp, synthetic construct
  source 1..42: mol_type = other DNA
tgtgctatgagagagagcacgggttaccagaacttctatttt

SEQ ID NO: 32133 - DNA, 45 bp, synthetic construct
  source 1..45: mol_type = other DNA
tgtgccagcagccaagaccgggacaactatgctgagcagttcttc

SEQ ID NO: 32134 - DNA, 45 bp, synthetic construct
  source 1..45: mol_type = other DNA
tgtgctatgagtcctcatgactcgggatacaacaaactcactttt

SEQ ID NO: 32135 - DNA, 45 bp, synthetic construct
  source 1..45: mol_type = other DNA
tgtgccagcagccaagacggactgggggaaaacaccttgtacttt

SEQ ID NO: 32136 - DNA, 33 bp, synthetic construct
  source 1..33: mol_type = other DNA
tgtgctctgggaggcaataacagaatcttcttt

SEQ ID NO: 32137 - DNA, 45 bp, synthetic construct
  source 1..45: mol_type = other DNA
tgtgccagcagccaagactggggaagctcctatgaacagtacttc

SEQ ID NO: 32138 - DNA, 48 bp, synthetic construct
  source 1..48: mol_type = other DNA
tgtgttctgggtgaaggggataataatgcaggtgccaagctcacattc

SEQ ID NO: 32139 - DNA, 51 bp, synthetic construct
  source 1..51: mol_type = other DNA
tgtgccagcagccaagactgggggggggagagtgcagaaacgctgtatttt

SEQ ID NO: 32140 - DNA, 42 bp, synthetic construct
  source 1..42: mol_type = other DNA
tgtgctctggtagcatcctcctccttcagcaagctggtgttt

SEQ ID NO: 32141 - DNA, 42 bp, synthetic construct
  source 1..42: mol_type = other DNA
tgtgccagcagccaagagagacagaactccgactacaccttc

SEQ ID NO: 32142 - DNA, 36 bp, synthetic construct
  source 1..36: mol_type = other DNA
tgtgcagtgtaccagggaggcagagctctgatattt

SEQ ID NO: 32143 - DNA, 42 bp, synthetic construct; identical to SEQ ID NO: 32141
  source 1..42: mol_type = other DNA

SEQ ID NO: 32144 - DNA, 39 bp, synthetic construct; identical to SEQ ID NO: 31814
  source 1..39: mol_type = other DNA

SEQ ID NO: 32145 - DNA, 36 bp, synthetic construct
  source 1..36: mol_type = other DNA
tgtgccagcagccaagagcacacagaagtcttcttt

SEQ ID NO: 32146 - DNA, 51 bp, synthetic construct
  source 1..51: mol_type = other DNA
tgtgctatgagagagccgaattatgggagcagtggcaacaagctcatcttt

SEQ ID NO: 32147 - DNA, 45 bp, synthetic construct
  source 1..45: mol_type = other DNA
tgtgccagcagccaagagcccagggggcaagacacccagtacttt

SEQ ID NO: 32148 - DNA, 42 bp, synthetic construct
  source 1..42: mol_type = other DNA
tgtgttttgagcgcttgggatagcaactatcagttgatctgg

SEQ ID NO: 32149 - DNA, 36 bp, synthetic construct
  source 1..36: mol_type = other DNA
tgtgccagcagccaagaggacgaaagattatttttc

SEQ ID NO: 32150 - DNA, 39 bp, synthetic construct
  source 1..39: mol_type = other DNA
tgtgctactccccccccaaatgcttacaaagtcatcttt

SEQ ID NO: 32151 - DNA, 54 bp, synthetic construct
  source 1..54: mol_type = other DNA
tgtgccagcagccaagaggggactgggggtgttaaccaagacacccagtacttt

SEQ ID NO: 32152 - DNA, 45 bp, synthetic construct
  source 1..45: mol_type = other DNA
tgtgctatagatcggcagacaggctttgcaagtgcgctgacattt

SEQ ID NO: 32153 - DNA, 42 bp, synthetic construct
  source 1..42: mol_type = other DNA
tgtgccagcagccaagatatgggggagagggaacagtacttc

SEQ ID NO: 32154 - DNA, 42 bp, synthetic construct
  source 1..42: mol_type = other DNA
tgcgcacactatagaggttcagccttagggaggctgcatttt

SEQ ID NO: 32155 - DNA, 42 bp, synthetic construct
  source 1..42: mol_type = other DNA
tgtgccagcagccaagatcaggggtactccgactacaccttc

SEQ ID NO: 32156 - DNA, 39 bp, synthetic construct
  source 1..39: mol_type = other DNA
tgtgctgtgagcccttccaataccgacaaagtcgtcttt

SEQ ID NO: 32157 - DNA, 45 bp, synthetic construct
  source 1..45: mol_type = other DNA
tgtgccagcagccaagatcgactggggaactatgaacagtacttc

SEQ ID NO: 32158 - DNA, 48 bp, synthetic construct
  source 1..48: mol_type = other DNA
tgtgcagtgagcataggcagtggaggcagcaattacaaactgacattt

SEQ ID NO: 32159 - DNA, 45 bp, synthetic construct
  source 1..45: mol_type = other DNA
tgtgccagcagccaagatcgggcttctggaaatacgctctatttt

SEQ ID NO: 32160 - DNA, 42 bp, synthetic construct
  source 1..42: mol_type = other DNA
tgcgcagcaggtaatcaaggagggtctgcgaagctcatcttt

SEQ ID NO: 32161 - DNA, 48 bp, synthetic construct
  source 1..48: mol_type = other DNA
tgtgccagcagccaagatgtgggatggggtcaaaacaccttgtacttt

SEQ ID NO: 32162 - DNA, 42 bp, synthetic construct
  source 1..42: mol_type = other DNA
tgtgctatgggagcatcctcctccttcagcaagctggtgttt

SEQ ID NO: 32163 - DNA, 51 bp, synthetic construct
  source 1..51: mol_type = other DNA
tgtgccagcagccaagattggacagggggaggccaagacacccagtacttt

SEQ ID NO: 32164 - DNA, 45 bp, synthetic construct
  source 1..45: mol_type = other DNA
tgtgcagcaagcgggagaggttcagccttagggaggctgcatttt

SEQ ID NO: 32165 - DNA, 45 bp, synthetic construct
  source 1..45: mol_type = other DNA
tgtgccagcagccaaggacaggcgaacaccgggcagctctacttt

SEQ ID NO: 32166 - DNA, 42 bp, synthetic construct
  source 1..42: mol_type = other DNA
tgtgctatggaagctaataatgcaggtgccaagctcacattc

SEQ ID NO: 32167 - DNA, 45 bp, synthetic construct
  source 1..45: mol_type = other DNA
tgtgccagcagccaaggacagggggcaaactccgactacaccttc

SEQ ID NO: 32168 - DNA, 45 bp, synthetic construct
  source 1..45: mol_type = other DNA
tgtgctgcaagtgcacgacctggcagtggtggaaaactcactttg

SEQ ID NO: 32169 - DNA, 39 bp, synthetic construct
  source 1..39: mol_type = other DNA
tgtgccagcagccaaggactggaatatgaacagtacttc

SEQ ID NO: 32170 - DNA, 36 bp, synthetic construct
  source 1..36: mol_type = other DNA
tgtgctgtaaataactatgcccagggattaaccttc

SEQ ID NO: 32171 - DNA, 51 bp, synthetic construct
  source 1..51: mol_type = other DNA
tgtgccagcagccatggacaggggtggaattctggaaatacgctctatttt

SEQ ID NO: 32172 - DNA, 42 bp, synthetic construct
  source 1..42: mol_type = other DNA
tgcattgtgactgacaggtctggaggctataaagtggtcttt

SEQ ID NO: 32173 - DNA, 42 bp, synthetic construct
  source 1..42: mol_type = other DNA
tgtgccagcagcccgggccctagtgcagaaacgctgtatttt

SEQ ID NO: 32174 - DNA, 42 bp, synthetic construct
  source 1..42: mol_type = other DNA
tgcattgtgactgacacttctggcagctggcaactcatcttt

SEQ ID NO: 32175 - DNA, 48 bp, synthetic construct; identical to SEQ ID NO: 31487
  source 1..48: mol_type = other DNA

SEQ ID NO: 32176 - DNA, 39 bp, synthetic construct
  source 1..39: mol_type = other DNA
tgtgcagcaagcaatgacaataccgacaaagtcgtcttt

SEQ ID NO: 32177 - DNA, 42 bp, synthetic construct
  source 1..42: mol_type = other DNA
tgtgccagcagccctcgactgggccaagacacccagtacttt

SEQ ID NO: 32178 - DNA, 45 bp, synthetic construct
  source 1..45: mol_type = other DNA
tgtgcagcaagcgggggaggttcagccttagggaggctgcatttt

SEQ ID NO: 32179 - DNA, 42 bp, synthetic construct
  source 1..42: mol_type = other DNA
tgtgccagcagcctcaggggcaactatgctgagcagttcttc

SEQ ID NO: 32180 - DNA, 33 bp, synthetic construct; identical to SEQ ID NO: 31900
  source 1..33: mol_type = other DNA

SEQ ID NO: 32181 - DNA, 45 bp, synthetic construct; identical to SEQ ID NO: 31501
  source 1..45: mol_type = other DNA

SEQ ID NO: 32182 - DNA, 48 bp, synthetic construct
  source 1..48: mol_type = other DNA
tgtgcagcaagcgtgggttatgggggcagtggcaacaagctcatcttt

SEQ ID NO: 32183 - DNA, 45 bp, synthetic construct
  source 1..45: mol_type = other DNA
tgtgccagcacctcaacgccgggaaaatatgctgagcagttcttc

SEQ ID NO: 32184 - DNA, 39 bp, synthetic construct; identical to SEQ ID NO: 31500
  source 1..39: mol_type = other DNA

SEQ ID NO: 32185 - DNA, 42 bp, synthetic construct
  source 1..42: mol_type = other DNA
tgtgccagcagatctgggtctagtgcagaaacgctgtatttt

SEQ ID NO: 32186 - DNA, 39 bp, synthetic construct
  source 1..39: mol_type = other DNA
tgtgctctgggtgcaaattctgggacttaccagaggttt

SEQ ID NO: 32187 - DNA, 42 bp, synthetic construct
  source 1..42: mol_type = other DNA
tgtgccagcagcaccgggactggggggtatgaacagtacttc

SEQ ID NO: 32188 - DNA, 33 bp, synthetic construct
  source 1..33: mol_type = other DNA
tgtgttctggggagcaactatcagttgatctgg

SEQ ID NO: 32189 - DNA, 45 bp, synthetic construct
  source 1..45: mol_type = other DNA
tgtgccagcagccaagactggggggggtatgctgagcagttcttc

SEQ ID NO: 32190 - DNA, 45 bp, synthetic construct
  source 1..45: mol_type = other DNA
tgtgctttgaggaccataacaggcaatactagaaaactcatcttt

SEQ ID NO: 32191 - DNA, 42 bp, synthetic construct
  source 1..42: mol_type = other DNA
tgtgccagcagccaggggttcggcaacgaaagattatttttc

SEQ ID NO: 32192 - DNA, 48 bp, synthetic construct
  source 1..48: mol_type = other DNA
tgtgctatgagagctatagcatcctcctccttcagcaagctggtgttt

SEQ ID NO: 32193 - DNA, 48 bp, synthetic construct
  source 1..48: mol_type = other DNA
tgtgccagcagcccaactgggggggccgcccaagacacccagtacttt

SEQ ID NO: 32194 - DNA, 39 bp, synthetic construct
  source 1..39: mol_type = other DNA
tgtgctatgagggctggagggtctgcgaagctcatcttt

SEQ ID NO: 32195 - DNA, 45 bp, synthetic construct
  source 1..45: mol_type = other DNA
tgtgccagcagccctagactgggggggcgctatgaacagtacttc

SEQ ID NO: 32196 - DNA, 48 bp, synthetic construct
  source 1..48: mol_type = other DNA
tgtgcagctagtgagcattatggaggaagcaatgcaaagctaaccttc

SEQ ID NO: 32197 - DNA, 39 bp, synthetic construct
  source 1..39: mol_type = other DNA
tgtgccagcagccgacaggcaaacacagaagtcttcttt

SEQ ID NO: 32198 - DNA, 39 bp, synthetic construct; identical to SEQ ID NO: 26102
  source 1..39: mol_type = other DNA

SEQ ID NO: 32199 - DNA, 36 bp, synthetic construct
  source 1..36: mol_type = other DNA
tgtgccagcagccggacagggaaggaagtcttcttt

SEQ ID NO: 32200 - DNA, 39 bp, synthetic construct
  source 1..39: mol_type = other DNA
tgtgctatgggccctggtagcttcaataagttgaccttt

SEQ ID NO: 32201 - DNA, 36 bp, synthetic construct
  source 1..36: mol_type = other DNA
tgtgccagcagccgggacagggaaacgctgtatttt

SEQ ID NO: 32202 - DNA, 36 bp, synthetic construct
  source 1..36: mol_type = other DNA
tgtgctccagacacaaatgcttacaaagtcatcttt

SEQ ID NO: 32203 - DNA, 42 bp, synthetic construct
  source 1..42: mol_type = other DNA
tgtgccagcagccggggggacagggacgaaagattatttttc

SEQ ID NO: 32204 - DNA, 33 bp, synthetic construct
  source 1..33: mol_type = other DNA
tgtgctgtgccaaatgcttacaaagtcatcttt

SEQ ID NO: 32205 - DNA, 42 bp, synthetic construct
  source 1..42: mol_type = other DNA
tgtgccagcagcctcgacagggggctttatgaacagtacttc

SEQ ID NO: 32206 - DNA, 42 bp, synthetic construct
  source 1..42: mol_type = other DNA
tgtgctatgagagaggccgcgggttaccagaacttctatttt

SEQ ID NO: 32207 - DNA, 42 bp, synthetic construct; identical to SEQ ID NO: 32205
  source 1..42: mol_type = other DNA

SEQ ID NO: 32208 - DNA, 42 bp, synthetic construct; identical to SEQ ID NO: 31478
  source 1..42: mol_type = other DNA

SEQ ID NO: 32209 - DNA, 42 bp, synthetic construct
  source 1..42: mol_type = other DNA
tgtgccagcagcctgggactgggggggtatgaacagtacttc

SEQ ID NO: 32210 - DNA, 42 bp, synthetic construct
  source 1..42: mol_type = other DNA
tgtgcagcaagtgcatcttctggcagctggcaactcatcttt

SEQ ID NO: 32211 - DNA, 42 bp, synthetic construct
  source 1..42: mol_type = other DNA
tgtgccagcagcctgggggttaaccaagacacccagtacttt

SEQ ID NO: 32212 - DNA, 39 bp, synthetic construct
  source 1..39: mol_type = other DNA
tgtgctatgggacgcaataacaacaatgccccacgattt

SEQ ID NO: 32213 - DNA, 39 bp, synthetic construct
  source 1..39: mol_type = other DNA
tgtgccagcagctatgacaatcaaaacaccttgtacttt

SEQ ID NO: 32214 - DNA, 36 bp, synthetic construct
  source 1..36: mol_type = other DNA
tgtgcagtgggagatagcaactatcagttgatctgg

SEQ ID NO: 32215 - DNA, 45 bp, synthetic construct
  source 1..45: mol_type = other DNA
tgtgccagcagctccgacagggttagtgcagaaacgctgtatttt

SEQ ID NO: 32216 - DNA, 39 bp, synthetic construct
  source 1..39: mol_type = other DNA
tgtgctactgacacttcaagtggccagaagctggttttt

SEQ ID NO: 32217 - DNA, 45 bp, synthetic construct
  source 1..45: mol_type = other DNA
tgtgccagcagctccgactggggggtctcctatgaacagtacttc

SEQ ID NO: 32218 - DNA, 42 bp, synthetic construct
  source 1..42: mol_type = other DNA
tgtgctctgagtggtggaggaagcaatgcaaagctaaccttc

SEQ ID NO: 32219 - DNA, 48 bp, synthetic construct
  source 1..48: mol_type = other DNA
tgtgccagcagctcgggactgggggacggctatgctgagcagttcttc

SEQ ID NO: 32220 - DNA, 36 bp, synthetic construct
  source 1..36: mol_type = other DNA
tgtgctctgggtgagggggggaacaagctaactttt

SEQ ID NO: 32221 - DNA, 36 bp, synthetic construct; identical to SEQ ID NO: 31675
  source 1..36: mol_type = other DNA

SEQ ID NO: 32222 - DNA, 42 bp, synthetic construct
  source 1..42: mol_type = other DNA
tgtgctctgggccccatggatagcaactatcagttgatctgg

SEQ ID NO: 32223 - DNA, 30 bp, synthetic construct
  source 1..30: mol_type = other DNA
tgtgccagcagcttagaaacgctgtatttt

SEQ ID NO: 32224 - DNA, 48 bp, synthetic construct
  source 1..48: mol_type = other DNA
tgtgctatgagagagggcgggggcacaaatgcttacaaagtcatcttt

SEQ ID NO: 32225 - DNA, 42 bp, synthetic construct
  source 1..42: mol_type = other DNA
tgtgccagcagcttctgggggggggcagacacccagtacttt

SEQ ID NO: 32226 - DNA, 48 bp, synthetic construct
  source 1..48: mol_type = other DNA
tgtgctctgagtgatggttctggaggaagcaatgcaaagctaaccttc

SEQ ID NO: 32227 - DNA, 42 bp, synthetic construct
  source 1..42: mol_type = other DNA
tgtgccagcagctttgacaattctggaaatacgctctatttt

SEQ ID NO: 32228 - DNA, 42 bp, synthetic construct
  source 1..42: mol_type = other DNA
tgtgctttgagcgttactggaggcaataataagctgactttt

SEQ ID NO: 32229 - DNA, 39 bp, synthetic construct
  source 1..39: mol_type = other DNA
tgtgccagcagttggacagcgaactccgactacaccttc

SEQ ID NO: 32230 - DNA, 39 bp, synthetic construct
  source 1..39: mol_type = other DNA
tgtgcagttagtaacacaaatgcttacaaagtcatcttt

SEQ ID NO: 32231 - DNA, 39 bp, synthetic construct
  source 1..39: mol_type = other DNA
tgtgccagcggaggacaggggaacacagaagtcttcttt

SEQ ID NO: 32232 - DNA, 36 bp, synthetic construct
  source 1..36: mol_type = other DNA
tgcgcagtcagggcgggttaccagaacttctatttt

SEQ ID NO: 32233 - DNA, 33 bp, synthetic construct
  source 1..33: mol_type = other DNA
tgtgccgccgggacagaacaggctccgcttttt

SEQ ID NO: 32234 - DNA, 42 bp, synthetic construct
  source 1..42: mol_type = other DNA
tgtgctgcaaggccgaattataaccaggggaagcttatcttt

SEQ ID NO: 32235 - DNA, 42 bp, synthetic construct
  source 1..42: mol_type = other DNA
tgtgccagcgccgggactgctagtcaaaacaccttgtacttt

SEQ ID NO: 32236 - DNA, 36 bp, synthetic construct
  source 1..36: mol_type = other DNA
tgtgctgtcacggatagcaactatcagttgatctgg

SEQ ID NO: 32237 - DNA, 42 bp, synthetic construct
  source 1..42: mol_type = other DNA
tgtgccagcggagacaggggtagtcaaaacaccttgtacttt

SEQ ID NO: 32238 - DNA, 39 bp, synthetic construct
  source 1..39: mol_type = other DNA
tgtgctatgagagagggcggtaccgacaaagtcgtcttt

SEQ ID NO: 32239 - DNA, 33 bp, synthetic construct
  source 1..33: mol_type = other DNA
tgtgccagcggccaaaacgaaagattatttttc

SEQ ID NO: 32240 - DNA, 39 bp, synthetic construct
  source 1..39: mol_type = other DNA
tgtgctctgaatcaaggagggtctgcgaagctcatcttt

SEQ ID NO: 32241 - DNA, 42 bp, synthetic construct; identical to SEQ ID NO: 31491
  source 1..42: mol_type = other DNA

SEQ ID NO: 32242 - DNA, 39 bp, synthetic construct
  source 1..39: mol_type = other DNA
tgtgctgtgagccataactatgcccagggcttaaccttc

SEQ ID NO: 32243 - DNA, 39 bp, synthetic construct
  source 1..39: mol_type = other DNA
tgtgccagcggctctgggggggcgagggaacagtacttc

SEQ ID NO: 32244 - DNA, 39 bp, synthetic construct
  source 1..39: mol_type = other DNA
tgtgctctgctctcttccaataccaacaaagtcgtcttt

SEQ ID NO: 32245 - DNA, 39 bp, synthetic construct
  source 1..39: mol_type = other DNA
tgtgccagcgggacagctgcaaacacagaagtcttcttt

SEQ ID NO: 32246 - DNA, 39 bp, synthetic construct
  source 1..39: mol_type = other DNA
tgtgctatggaacgggcgggatacaacaaactcactttt

SEQ ID NO: 32247 - DNA, 36 bp, synthetic construct
  source 1..36: mol_type = other DNA
tgtgccagcgggacattttatgctgagcagttcttc

SEQ ID NO: 32248 - DNA, 48 bp, synthetic construct
  source 1..48: mol_type = other DNA
tgtgctgtgagcgcgatgcagcaaggcactgggtctaagctgtcattt

SEQ ID NO: 32249 - DNA, 33 bp, synthetic construct
  source 1..33: mol_type = other DNA
tgtgccagcgggatccaagacacccagtacttt

SEQ ID NO: 32250 - DNA, 39 bp, synthetic construct
  source 1..39: mol_type = other DNA
tgtgctgcaagtaacacgggttaccagaacttctatttt

SEQ ID NO: 32251 - DNA, 39 bp, synthetic construct
  source 1..39: mol_type = other DNA
tgtgccagcggggacaggggagagaacaccttgtacttt

SEQ ID NO: 32252 - DNA, 48 bp, synthetic construct
  source 1..48: mol_type = other DNA
tgtgctatgagagagacgcagcaaggcactgggtctaagctgtcattt

SEQ ID NO: 32253 - DNA, 42 bp, synthetic construct
  source 1..42: mol_type = other DNA
tgtgccagcggggaggacaattccaacgaaagattatttttc

SEQ ID NO: 32254 - DNA, 33 bp, synthetic construct
  source 1..33: mol_type = other DNA
tgtgcagcaagtgaggggaacgtgctttacttc

SEQ ID NO: 32255 - DNA, 45 bp, synthetic construct
  source 1..45: mol_type = other DNA
tgtgccagcggggatgcccgggacatctatgctgagcagttcttc

SEQ ID NO: 32256 - DNA, 45 bp, synthetic construct
  source 1..45: mol_type = other DNA
tgtgctctgggtgatctcgatggcagtggtggaaaactcactttg

SEQ ID NO: 32257 - DNA, 36 bp, synthetic construct
  source 1..36: mol_type = other DNA
tgtgccagcgggggacatcaagacacccagtacttt

SEQ ID NO: 32258 - DNA, 39 bp, synthetic construct
  source 1..39: mol_type = other DNA
tgcgcccccccctaccagggaggcagagctctgatattt

SEQ ID NO: 32259 - DNA, 39 bp, synthetic construct
  source 1..39: mol_type = other DNA
tgtgccagcggggggacagactatgctgagcagttcttc

SEQ ID NO: 32260 - DNA, 42 bp, synthetic construct
  source 1..42: mol_type = other DNA
tgtgcagcaagtgcagactatggaaatgagaaaataactttt

SEQ ID NO: 32261 - DNA, 45 bp, synthetic construct
  source 1..45: mol_type = other DNA
tgtgccagcggtacaaccgggacatccaacgaaagattatttttc

SEQ ID NO: 32262 - DNA, 42 bp, synthetic construct
  source 1..42: mol_type = other DNA
tgtgctatgagagagtccacgggttaccagaacttctatttt

SEQ ID NO: 32263 - DNA, 33 bp, synthetic construct
  source 1..33: mol_type = other DNA
tgtgccagcggtcagggggcagaagtcttcttt

SEQ ID NO: 32264 - DNA, 36 bp, synthetic construct
  source 1..36: mol_type = other DNA
tgtgctatggacacgggttaccagaacttctatttt

SEQ ID NO: 32265 - DNA, 39 bp, synthetic construct; identical to SEQ ID NO: 31573
  source 1..39: mol_type = other DNA

SEQ ID NO: 32266 - DNA, 48 bp, synthetic construct; identical to SEQ ID NO: 32138
  source 1..48: mol_type = other DNA

SEQ ID NO: 32267 - DNA, 36 bp, synthetic construct
  source 1..36: mol_type = other DNA
tgtgccagcggtgaaaaaaacacagaagtcttcttt

SEQ ID NO: 32268 - DNA, 36 bp, synthetic construct
  source 1..36: mol_type = other DNA
tgtgctttgagttctggcagctggcaactcatcttt

SEQ ID NO: 32269 - DNA, 33 bp, synthetic construct
  source 1..33: mol_type = other DNA
tgtgccagcggtgaaaacacagaagtcttcttt

SEQ ID NO: 32270 - DNA, 48 bp, synthetic construct
  source 1..48: mol_type = other DNA
tgtgctgtgagctacaattctggaggaagcaatgcaaagctaaccttc

SEQ ID NO: 32271 - DNA, 39 bp, synthetic construct
  source 1..39: mol_type = other DNA
tgtgccagcggtgaaacagcaaactccgactacaccttc

SEQ ID NO: 32272 - DNA, 45 bp, synthetic construct
  source 1..45: mol_type = other DNA
tgtgctttgagtcatactggaggactaagtggtaaattaacattc

SEQ ID NO: 32273 - DNA, 36 bp, synthetic construct
  source 1..36: mol_type = other DNA
tgtgccagcggtgaaaggaactccgactacaccttc

SEQ ID NO: 32274 - DNA, 36 bp, synthetic construct
  source 1..36: mol_type = other DNA
tgtgcaaccatgtctaattacaacgtgctttacttc

SEQ ID NO: 32275 - DNA, 24 bp, synthetic construct
  source 1..24: mol_type = other DNA
tgtgccagcggtgaacagtacttc

SEQ ID NO: 32276 - DNA, 36 bp, synthetic construct
  source 1..36: mol_type = other DNA
tgtggtccatcctcctccttcagcaagctggtgttt

SEQ ID NO: 32277 - DNA, 45 bp, synthetic construct
  source 1..45: mol_type = other DNA
tgtgccagcggtgaacgggggcttaaccaagacacccagtacttt

SEQ ID NO: 32278 - DNA, 48 bp, synthetic construct
  source 1..48: mol_type = other DNA
tgtgctctgagtgatctttgggggagcagtggcaacaagctcatcttt

SEQ ID NO: 32279 - DNA, 45 bp, synthetic construct
  source 1..45: mol_type = other DNA
tgtgccagcggtgaagcagggtactccaacgaaagattatttttc

SEQ ID NO: 32280 - DNA, 36 bp, synthetic construct; identical to SEQ ID NO: 31494
  source 1..36: mol_type = other DNA

SEQ ID NO: 32281 - DNA, 45 bp, synthetic construct; identical to SEQ ID NO: 31515
  source 1..45: mol_type = other DNA

SEQ ID NO: 32282 - DNA, 51 bp, synthetic construct
  source 1..51: mol_type = other DNA
tgtactatgagagagggccgggctactggaggcaataataagctgactttt

SEQ ID NO: 32283 - DNA, 42 bp, synthetic construct
  source 1..42: mol_type = other DNA
tgtgccagcggtgacaggggtagtcaaaacaccttgtacttt

SEQ ID NO: 32284 - DNA, 39 bp, synthetic construct; identical to SEQ ID NO: 32238
  source 1..39: mol_type = other DNA

SEQ ID NO: 32285 - DNA, 33 bp, synthetic construct
  source 1..33: mol_type = other DNA
tgtgccagcggtgacagggttgaacagtacttc

SEQ ID NO: 32286 - DNA, 42 bp, synthetic construct
  source 1..42: mol_type = other DNA
tgtgctatggaaaggacagaaggtgcagatagactcaccttt

SEQ ID NO: 32287 - DNA, 45 bp, synthetic construct
  source 1..45: mol_type = other DNA
tgtgccagcggtgacctggggggtagtcaaaacaccttgtacttt

SEQ ID NO: 32288 - DNA, 36 bp, synthetic construct
  source 1..36: mol_type = other DNA
tgtgctatgagagagggcggtaacagaatcttcttt

SEQ ID NO: 32289 - DNA, 33 bp, synthetic construct
  source 1..33: mol_type = other DNA
tgtgccagcggtgagaatgctgagcagttcttc

SEQ ID NO: 32290 - DNA, 42 bp, synthetic construct
  source 1..42: mol_type = other DNA
tgtgctctggcccttacaggcaataccggaaaactcatcttt

SEQ ID NO: 32291 - DNA, 39 bp, synthetic construct
  source 1..39: mol_type = other DNA
tgtgccagcggtgagacaggggtagctgagcagttcttc

SEQ ID NO: 32292 - DNA, 36 bp, synthetic construct; identical to SEQ ID NO: 26248
  source 1..36: mol_type = other DNA

SEQ ID NO: 32293 - DNA, 42 bp, synthetic construct; identical to SEQ ID NO: 31581
  source 1..42: mol_type = other DNA

SEQ ID NO: 32294 - DNA, 33 bp, synthetic construct
  source 1..33: mol_type = other DNA
tgtgcaatgagtaacaataacagaatcttcttt

SEQ ID NO: 32295 - DNA, 42 bp, synthetic construct; identical to SEQ ID NO: 31581
  source 1..42: mol_type = other DNA

SEQ ID NO: 32296 - DNA, 42 bp, synthetic construct
  source 1..42: mol_type = other DNA
tgtgctatgagagaggggaactatgcccagggattaaccttc

SEQ ID NO: 32297 - DNA, 42 bp, synthetic construct; identical to SEQ ID NO: 31581
  source 1..42: mol_type = other DNA

SEQ ID NO: 32298 - DNA, 42 bp, synthetic construct
  source 1..42: mol_type = other DNA
tgtgctatgagagataacaccaatacaggcaaattaaccttt

SEQ ID NO: 32299 - DNA, 42 bp, synthetic construct; identical to SEQ ID NO: 31581
  source 1..42: mol_type = other DNA

SEQ ID NO: 32300 - DNA, 36 bp, synthetic construct
  source 1..36: mol_type = other DNA
tgtgctctaggcacaaatgcttacaaagtcatcttt

SEQ ID NO: 32301 - DNA, 36 bp, synthetic construct
  source 1..36: mol_type = other DNA
tgtgccagcggtgagcagggggctgaagtcttcttt

SEQ ID NO: 32302 - DNA, 45 bp, synthetic construct
  source 1..45: mol_type = other DNA
tgtgctatgagagaggggaacagtgcagggaacaagctaactttt

SEQ ID NO: 32303 - DNA, 42 bp, synthetic construct
  source 1..42: mol_type = other DNA
tgtgccagcggtgagcgtaagggtgcagaaacgctgtatttt

SEQ ID NO: 32304 - DNA, 42 bp, synthetic construct; identical to SEQ ID NO: 31478
  source 1..42: mol_type = other DNA

SEQ ID NO: 32305 - DNA, 42 bp, synthetic construct; identical to SEQ ID NO: 32303
  source 1..42: mol_type = other DNA

SEQ ID NO: 32306 - DNA, 42 bp, synthetic construct; identical to SEQ ID NO: 31476
  source 1..42: mol_type = other DNA

SEQ ID NO: 32307 - DNA, 42 bp, synthetic construct; identical to SEQ ID NO: 32303
  source 1..42: mol_type = other DNA

SEQ ID NO: 32308 - DNA, 42 bp, synthetic construct
  source 1..42: mol_type = other DNA
tgcgcagtcagtgagacaggctttgcaagtgcgctgacattt

SEQ ID NO: 32309 - DNA, 42 bp, synthetic construct
  source 1..42: mol_type = other DNA
tgtgccagcggtgaggcagggggcggcacagaagtcttcttt

SEQ ID NO: 32310 - DNA, 42 bp, synthetic construct
  source 1..42: mol_type = other DNA
tgcgcagtcagtgggtcttcaagtggccagaagctggttttt

SEQ ID NO: 32311 - DNA, 42 bp, synthetic construct
  source 1..42: mol_type = other DNA
tgtgccagcggtgagggaaattctggaaatacgctctatttt

SEQ ID NO: 32312 - DNA, 42 bp, synthetic construct
  source 1..42: mol_type = other DNA
tgtgctttgaggacaactgccagtttggggaaactgcagttt

SEQ ID NO: 32313 - DNA, 42 bp, synthetic construct; identical to SEQ ID NO: 31739
  source 1..42: mol_type = other DNA

SEQ ID NO: 32314 - DNA, 48 bp, synthetic construct
  source 1..48: mol_type = other DNA
tgcgcagtcagagccctttatgggggcagtggcaacaagctcatcttt

SEQ ID NO: 32315 - DNA, 45 bp, synthetic construct
  source 1..45: mol_type = other DNA
tgtgccagcggtgatcagggaaatagtgcagaaacgctgtatttt

SEQ ID NO: 32316 - DNA, 48 bp, synthetic construct
  source 1..48: mol_type = other DNA
tgtgctttgagtgatggagcaacctcctccttcagcaagctggtgttt

SEQ ID NO: 32317 - DNA, 33 bp, synthetic construct
  source 1..33: mol_type = other DNA
tgtgccagcggtgatcagggagaagtcttcttt

SEQ ID NO: 32318 - DNA, 39 bp, synthetic construct
  source 1..39: mol_type = other DNA
tgcgcagtccctaacagtgcagggaacaagctaactttt

SEQ ID NO: 32319 - DNA, 42 bp, synthetic construct
  source 1..42: mol_type = other DNA
tgtgccagcggtgatcagggggaggattcgcccctctacttt

SEQ ID NO: 32320 - DNA, 42 bp, synthetic construct
  source 1..42: mol_type = other DNA
tgtgcagcaagcaaggactcgggatacaacaaactcactttt

SEQ ID NO: 32321 - DNA, 42 bp, synthetic construct
  source 1..42: mol_type = other DNA
tgtgccagcggtgatcagggggctggcgaaagattatttttc

SEQ ID NO: 32322 - DNA, 42 bp, synthetic construct
  source 1..42: mol_type = other DNA
tgtgctctgagtaagaatacaggaaactacaaatacgtcttt

SEQ ID NO: 32323 - DNA, 42 bp, synthetic construct
  source 1..42: mol_type = other DNA
tgtgccagcggtgatccagctagtgcagaaacgctgtatttt

SEQ ID NO: 32324 - DNA, 39 bp, synthetic construct
  source 1..39: mol_type = other DNA
tgtgctgtgaatatgactaattacaacgtgctttacttc

SEQ ID NO: 32325 - DNA, 42 bp, synthetic construct
  source 1..42: mol_type = other DNA
tgtgccagcggtgatcccagtagtgcagaaacgctgtatttt

SEQ ID NO: 32326 - DNA, 42 bp, synthetic construct
  source 1..42: mol_type = other DNA
tgtgcagcaagtgaatacacaaatgcttacaaagtcatcttt

SEQ ID NO: 32327 - DNA, 45 bp, synthetic construct; identical to SEQ ID NO: 31603
  source 1..45: mol_type = other DNA

SEQ ID NO: 32328 - DNA, 48 bp, synthetic construct
  source 1..48: mol_type = other DNA
tgtgctgcgagcccgaatactggaggactaagtggtaaattaacattc

SEQ ID NO: 32329 - DNA, 45 bp, synthetic construct; identical to SEQ ID NO: 31603
  source 1..45: mol_type = other DNA

SEQ ID NO: 32330 - DNA, 42 bp, synthetic construct; identical to SEQ ID NO: 31488
  source 1..42: mol_type = other DNA

SEQ ID NO: 32331 - DNA, 45 bp, synthetic construct; identical to SEQ ID NO: 31603
  source 1..45: mol_type = other DNA

SEQ ID NO: 32332 - DNA, 42 bp, synthetic construct
  source 1..42: mol_type = other DNA
tgtgcagcaagcagtggaggcagcaattacaaactgacattt

SEQ ID NO: 32333 - DNA, 51 bp, synthetic construct
  source 1..51: mol_type = other DNA
tgtgccagcggtgatcctaggactgggacaaacaccgggcagctctacttt

SEQ ID NO: 32334 - DNA, 45 bp, synthetic construct
  source 1..45: mol_type = other DNA
tgtgctgtgagcgcggaggactacagcaacaacagacttactttg

SEQ ID NO: 32335 - DNA, 45 bp, synthetic construct
  source 1..45: mol_type = other DNA
tgtgccagcggtgatccttactgggggggcgctgaacagtacttc

SEQ ID NO: 32336 - DNA, 39 bp, synthetic construct; identical to SEQ ID NO: 31486
  source 1..39: mol_type = other DNA

SEQ ID NO: 32337 - DNA, 45 bp, synthetic construct; identical to SEQ ID NO: 32335
  source 1..45: mol_type = other DNA

SEQ ID NO: 32338 - DNA, 39 bp, synthetic construct
  source 1..39: mol_type = other DNA
tgcgcagccttaacaggcaataccggaaaactcatcttt

SEQ ID NO: 32339 - DNA, 42 bp, synthetic construct
  source 1..42: mol_type = other DNA
tgtgccagcggtgatctggggggggtttatgaacagtacttc

SEQ ID NO: 32340 - DNA, 42 bp, synthetic construct
  source 1..42: mol_type = other DNA
tgtgcagtgagcataaacacgggttaccagaacttctatttt

SEQ ID NO: 32341 - DNA, 39 bp, synthetic construct
  source 1..39: mol_type = other DNA
tgtgccagcggtgatctggggggtattgaacagtacttc

SEQ ID NO: 32342 - DNA, 39 bp, synthetic construct
  source 1..39: mol_type = other DNA
tgcattgtgactgacatggataccgacaaagtcgtcttt

SEQ ID NO: 32343 - DNA, 36 bp, synthetic construct
  source 1..36: mol_type = other DNA
tgtgccagcggtgatgaactctatgaacagtacttc

SEQ ID NO: 32344 - DNA, 36 bp, synthetic construct
  source 1..36: mol_type = other DNA
tgcgccctcgcaaattctgggacttaccagaggttt

SEQ ID NO: 32345 - DNA, 45 bp, synthetic construct
  source 1..45: mol_type = other DNA
tgtgccagcggtgatgaaggagggagtgacacagaagtcttcttt

SEQ ID NO: 32346 - DNA, 42 bp, synthetic construct
  source 1..42: mol_type = other DNA
tgtgcagcaagtggaaacacgggttaccagaacttctatttt

SEQ ID NO: 32347 - DNA, 42 bp, synthetic construct
  source 1..42: mol_type = other DNA
tgtgccagcggtgatgaggggaaccaagacacccagtacttt

SEQ ID NO: 32348 - DNA, 36 bp, synthetic construct
  source 1..36: mol_type = other DNA
tgtgctctgaggaacatgggctacaaacttaccttc

SEQ ID NO: 32349 - DNA, 45 bp, synthetic construct
  source 1..45: mol_type = other DNA
tgtgccagcggtgatgatggggggaactatgctgagcagttcttc

SEQ ID NO: 32350 - DNA, 36 bp, synthetic construct
  source 1..36: mol_type = other DNA
tgtgctctggttaactatgcccagggattaaccttc

SEQ ID NO: 32351 - DNA, 45 bp, synthetic construct
  source 1..45: mol_type = other DNA
tgtgccagcggtgatgcaaagggggcgggaaatacgctctatttt

SEQ ID NO: 32352 - DNA, 39 bp, synthetic construct
  source 1..39: mol_type = other DNA
tgtgctactgccccgactggaggctataaagtggtcttt

SEQ ID NO: 32353 - DNA, 39 bp, synthetic construct
  source 1..39: mol_type = other DNA
tgtgccagcggtgatgcaggggggtgggaacagtacttc

SEQ ID NO: 32354 - DNA, 42 bp, synthetic construct
  source 1..42: mol_type = other DNA
tgtgctctgagtgtgtctggcagtggtggaaaactcactttg

SEQ ID NO: 32355 - DNA, 39 bp, synthetic construct
  source 1..39: mol_type = other DNA
tgtgccagcggtgatgcagggttcacagaagtcttcttt

SEQ ID NO: 32356 - DNA, 30 bp, synthetic construct
  source 1..30: mol_type = other DNA
tgcacagaggcaggtgccaagctcacattc

SEQ ID NO: 32357 - DNA, 36 bp, synthetic construct
  source 1..36: mol_type = other DNA
tgtgccagcggtgatgcccagtatgaacagtacttc

SEQ ID NO: 32358 - DNA, 33 bp, synthetic construct
  source 1..33: mol_type = other DNA
tgtgcagtgcccaataccaacaaagtcgtcttt

SEQ ID NO: 32359 - DNA, 48 bp, synthetic construct
  source 1..48: mol_type = other DNA
tgtgccagcggtgatgccgggactcctagtgcagaaacgctgtatttt

SEQ ID NO: 32360 - DNA, 36 bp, synthetic construct
  source 1..36: mol_type = other DNA
tgtgctgcaggttccaataccaacaaagtcgtcttt

SEQ ID NO: 32361 - DNA, 54 bp, synthetic construct
  source 1..54: mol_type = other DNA
tgtgccagcggtgatgcgggctggggggggctgaacaccgggcagctctacttt

SEQ ID NO: 32362 - DNA, 39 bp, synthetic construct
  source 1..39: mol_type = other DNA
tgtgctctgagtgacacaaatgcttacaaagtcatcttt

SEQ ID NO: 32363 - DNA, 36 bp, synthetic construct
  source 1..36: mol_type = other DNA
tgtgccagcggtgatgcgtccacagaagtcttcttt

SEQ ID NO: 32364 - DNA, 42 bp, synthetic construct
  source 1..42: mol_type = other DNA
tgtgctttgagtgcgaatacaggaaactacaaatacgtcttt

SEQ ID NO: 32365 - DNA, 45 bp, synthetic construct
  source 1..45: mol_type = other DNA
tgtgccagcggtgatgctggcagggagaacacagaagtcttcttt

SEQ ID NO: 32366 - DNA, 42 bp, synthetic construct
  source 1..42: mol_type = other DNA
tgtgcagcaagtgcaagctatggaaatgagaaaataactttt

SEQ ID NO: 32367 - DNA, 48 bp, synthetic construct
  source 1..48: mol_type = other DNA
tgtgccagcggtgatgggactggggtctaccaagacacccagtacttt

SEQ ID NO: 32368 - DNA, 48 bp, synthetic construct
  source 1..48: mol_type = other DNA
tgcgcagtcagtgcaggaactggagctaacactggaaagctcacgttt

SEQ ID NO: 32369 - DNA, 39 bp, synthetic construct; identical to SEQ ID NO: 31481
  source 1..39: mol_type = other DNA

SEQ ID NO: 32370 - DNA, 45 bp, synthetic construct
  source 1..45: mol_type = other DNA
tgtgctatgagagagggcagctatggaaatgagaaaataactttt

SEQ ID NO: 32371 - DNA, 39 bp, synthetic construct; identical to SEQ ID NO: 31481
  source 1..39: mol_type = other DNA

SEQ ID NO: 32372 - DNA, 39 bp, synthetic construct
  source 1..39: mol_type = other DNA
tgtgctatgtgtgggggcagtggcaacaagctcatcttt

SEQ ID NO: 32373 - DNA, 39 bp, synthetic construct; identical to SEQ ID NO: 31481
  source 1..39: mol_type = other DNA

SEQ ID NO: 32374 - DNA, 45 bp, synthetic construct
  source 1..45: mol_type = other DNA
tgtgctttgagccgaccggactacagcaacaacagacttactttg

SEQ ID NO: 32375 - DNA, 42 bp, synthetic construct
  source 1..42: mol_type = other DNA
tgtgccagcggtgatggggggagtgcagaaacgctgtatttt

SEQ ID NO: 32376 - DNA, 51 bp, synthetic construct
  source 1..51: mol_type = other DNA
tgtgctctgagtgggcctatagcatcctcctccttcagcaagctggtgttt

SEQ ID NO: 32377 - DNA, 42 bp, synthetic construct
  source 1..42: mol_type = other DNA
tgtgccagcggtgatggggggggacaagacacccagtacttt

SEQ ID NO: 32378 - DNA, 36 bp, synthetic construct
  source 1..36: mol_type = other DNA
tgtgctatgcggactggaggctataaagtggtcttt

SEQ ID NO: 32379 - DNA, 42 bp, synthetic construct
  source 1..42: mol_type = other DNA
tgtgccagcggtgatgggggttccaacgaaagattatttttc

SEQ ID NO: 32380 - DNA, 36 bp, synthetic construct
  source 1..36: mol_type = other DNA
tgtgcttcgaacacgggttaccagaacttctatttt

SEQ ID NO: 32381 - DNA, 45 bp, synthetic construct
  source 1..45: mol_type = other DNA
tgtgccagcggtgatgtacgactggggggttatgaacagtacttc

SEQ ID NO: 32382 - DNA, 42 bp, synthetic construct
  source 1..42: mol_type = other DNA
tgcgcagtcagtggtacaggaggtgcagatagactcaccttt

SEQ ID NO: 32383 - DNA, 42 bp, synthetic construct
  source 1..42: mol_type = other DNA
tgtgccagcggtgatgtggggggtgcagaaacgctgtatttt

SEQ ID NO: 32384 - DNA, 42 bp, synthetic construct
  source 1..42: mol_type = other DNA
tgtgctctggcccatgacacaaatgcttacaaagtcatcttt

SEQ ID NO: 32385 - DNA, 33 bp, synthetic construct
  source 1..33: mol_type = other DNA
tgtgccagcggtgattttaaagaagtcttcttt

SEQ ID NO: 32386 - DNA, 39 bp, synthetic construct
  source 1..39: mol_type = other DNA
tgtgcagagaatcaaggagggtctgcgaagctcatcttt

SEQ ID NO: 32387 - DNA, 45 bp, synthetic construct
  source 1..45: mol_type = other DNA
tgtgccagcggtgattttggggttagtgcagaaacgctgtatttt

SEQ ID NO: 32388 - DNA, 42 bp, synthetic construct
  source 1..42: mol_type = other DNA
tgtgctactgacctagacacaaatgcttacaaagtcatcttt

SEQ ID NO: 32389 - DNA, 45 bp, synthetic construct; identical to SEQ ID NO: 32387
  source 1..45: mol_type = other DNA

SEQ ID NO: 32390 - DNA, 42 bp, synthetic construct; identical to SEQ ID NO: 31478
  source 1..42: mol_type = other DNA

SEQ ID NO: 32391 - DNA, 45 bp, synthetic construct; identical to SEQ ID NO: 32387
  source 1..45: mol_type = other DNA

SEQ ID NO: 32392 - DNA, 42 bp, synthetic construct; identical to SEQ ID NO: 31476
  source 1..42: mol_type = other DNA

SEQ ID NO: 32393 - DNA, 48 bp, synthetic construct
  source 1..48: mol_type = other DNA
tgtgccagcggtgcagggactgggggaaaccaagacacccagtacttt

SEQ ID NO: 32394 - DNA, 45 bp, synthetic construct
  source 1..45: mol_type = other DNA
tgtgctatgagagactcatcttctggcagctggcaactcatcttt

SEQ ID NO: 32395 - DNA, 45 bp, synthetic construct
  source 1..45: mol_type = other DNA
tgtgccagcggtggaccgggacaggccccctccgactacaccttc

SEQ ID NO: 32396 - DNA, 45 bp, synthetic construct; identical to SEQ ID NO: 31558
  source 1..45: mol_type = other DNA

SEQ ID NO: 32397 - DNA, 48 bp, synthetic construct; identical to SEQ ID NO: 31475
  source 1..48: mol_type = other DNA

SEQ ID NO: 32398 - DNA, 42 bp, synthetic construct
  source 1..42: mol_type = other DNA
tgtgcagcaagcctcaattataaccaggggaagcttatcttt

SEQ ID NO: 32399 - DNA, 48 bp, synthetic construct; identical to SEQ ID NO: 31475
  source 1..48: mol_type = other DNA

SEQ ID NO: 32400 - DNA, 39 bp, synthetic construct
  source 1..39: mol_type = other DNA
tgtgctatggaacgttccaataccaacaaagtcgtcttt

SEQ ID NO: 32401 - DNA, 48 bp, synthetic construct; identical to SEQ ID NO: 31475
  source 1..48: mol_type = other DNA

SEQ ID NO: 32402 - DNA, 39 bp, synthetic construct
  source 1..39: mol_type = other DNA
tgtgctatggaaaataactatgcccagggattaaccttc

SEQ ID NO: 32403 - DNA, 48 bp, synthetic construct; identical to SEQ ID NO: 31475
  source 1..48: mol_type = other DNA

SEQ ID NO: 32404 - DNA, 48 bp, synthetic construct; identical to SEQ ID NO: 32138
  source 1..48: mol_type = other DNA

SEQ ID NO: 32405 - DNA, 48 bp, synthetic construct; identical to SEQ ID NO: 31475
  source 1..48: mol_type = other DNA

SEQ ID NO: 32406 - DNA, 48 bp, synthetic construct
  source 1..48: mol_type = other DNA
tgtgctctgagcccgaattctggaggaagcaatgcaaagctaaccttc

SEQ ID NO: 32407 - DNA, 48 bp, synthetic construct; identical to SEQ ID NO: 31475
  source 1..48: mol_type = other DNA

SEQ ID NO: 32408 - DNA, 36 bp, synthetic construct
  source 1..36: mol_type = other DNA
tgtgctcccaacaccaatacaggcaaattaaccttt

SEQ ID NO: 32409 - DNA, 48 bp, synthetic construct; identical to SEQ ID NO: 31475
  source 1..48: mol_type = other DNA

SEQ ID NO: 32410 - DNA, 36 bp, synthetic construct; identical to SEQ ID NO: 31892
  source 1..36: mol_type = other DNA

SEQ ID NO: 32411 - DNA, 48 bp, synthetic construct; identical to SEQ ID NO: 31475
  source 1..48: mol_type = other DNA

SEQ ID NO: 32412 - DNA, 36 bp, synthetic construct
  source 1..36: mol_type = other DNA
tgtgctgagggggagtatgcaaacaagatgatcttt

SEQ ID NO: 32413 - DNA, 48 bp, synthetic construct; identical to SEQ ID NO: 31475
  source 1..48: mol_type = other DNA

SEQ ID NO: 32414 - DNA, 39 bp, synthetic construct; identical to SEQ ID NO: 31700
  source 1..39: mol_type = other DNA

SEQ ID NO: 32415 - DNA, 48 bp, synthetic construct; identical to SEQ ID NO: 31475
  source 1..48: mol_type = other DNA

SEQ ID NO: 32416 - DNA, 42 bp, synthetic construct; identical to SEQ ID NO: 32290
  source 1..42: mol_type = other DNA

SEQ ID NO: 32417 - DNA, 48 bp, synthetic construct; identical to SEQ ID NO: 31475
  source 1..48: mol_type = other DNA

SEQ ID NO: 32418 - DNA, 42 bp, synthetic construct; identical to SEQ ID NO: 32308
  source 1..42: mol_type = other DNA

SEQ ID NO: 32419 - DNA, 48 bp, synthetic construct; identical to SEQ ID NO: 31475
  source 1..48: mol_type = other DNA

SEQ ID NO: 32420 - DNA, 36 bp, synthetic construct
  source 1..36: mol_type = other DNA
tgtgctgcgggaacgggttaccagaacttctatttt

SEQ ID NO: 32421 - DNA, 42 bp, synthetic construct
  source 1..42: mol_type = other DNA
tgtgccagcggtggggactgggggggcgctgaacagtacttc

SEQ ID NO: 32422 - DNA, 42 bp, synthetic construct
  source 1..42: mol_type = other DNA
tgtgctgcaagtcgggcaggaggtgcagatagactcaccttt

SEQ ID NO: 32423 - DNA, 30 bp, synthetic construct
  source 1..30: mol_type = other DNA
tgtgccagcggtggttatgaacagtacttc

SEQ ID NO: 32424 - DNA, 45 bp, synthetic construct
  source 1..45: mol_type = other DNA
tgtgcagtgagcatggctactggaggcaataataagctgactttt

SEQ ID NO: 32425 - DNA, 45 bp, synthetic construct
  source 1..45: mol_type = other DNA
tgtgccagcggttctggggggcttaaccaagacacccagtacttt

SEQ ID NO: 32426 - DNA, 42 bp, synthetic construct
  source 1..42: mol_type = other DNA
tgtgctatgagagatgactcgggatacaacaaactcactttt

SEQ ID NO: 32427 - DNA, 36 bp, synthetic construct
  source 1..36: mol_type = other DNA
tgtgccagcgtttcagggaactccgactacaccttc

SEQ ID NO: 32428 - DNA, 39 bp, synthetic construct
  source 1..39: mol_type = other DNA
tgtgcagtgaagaactatggaaatgagaaaataactttt

SEQ ID NO: 32429 - DNA, 39 bp, synthetic construct
  source 1..39: mol_type = other DNA
tgtgccagttggactgggggggatgctgagcagttcttc

SEQ ID NO: 32430 - DNA, 42 bp, synthetic construct
  source 1..42: mol_type = other DNA
tgtgctccgccaagaggttcagccttagggaggctgcatttt

SEQ ID NO: 32431 - DNA, 36 bp, synthetic construct
  source 1..36: mol_type = other DNA
tgtgccaccgggacaggctcctatgaacagtacttc

SEQ ID NO: 32432 - DNA, 36 bp, synthetic construct
  source 1..36: mol_type = other DNA
tgtatcccctacacgggttaccagaacttctatttt

SEQ ID NO: 32433 - DNA, 42 bp, synthetic construct
  source 1..42: mol_type = other DNA
tgtgccagcaaggactgggggaactcctatgaacagtacttc

SEQ ID NO: 32434 - DNA, 42 bp, synthetic construct; identical to SEQ ID NO: 31476
  source 1..42: mol_type = other DNA

SEQ ID NO: 32435 - DNA, 42 bp, synthetic construct; identical to SEQ ID NO: 32433
  source 1..42: mol_type = other DNA

SEQ ID NO: 32436 - DNA, 42 bp, synthetic construct
  source 1..42: mol_type = other DNA
tgcgcagcaggtgcgcaaggagggtctgcgaagctcatcttt

SEQ ID NO: 32437 - DNA, 33 bp, synthetic construct; identical to SEQ ID NO: 31609
  source 1..33: mol_type = other DNA

SEQ ID NO: 32438 - DNA, 42 bp, synthetic construct
  source 1..42: mol_type = other DNA
tgtgcagtgagcaggggttcagccttagggaggctgcatttt

SEQ ID NO: 32439 - DNA, 42 bp, synthetic construct
  source 1..42: mol_type = other DNA
tgtgccagcagagggacagttaaccaagacacccagtacttt

SEQ ID NO: 32440 - DNA, 45 bp, synthetic construct
  source 1..45: mol_type = other DNA
tgtgctctgagtgatcaggatggtgacaacagtaagctgatttgg

SEQ ID NO: 32441 - DNA, 42 bp, synthetic construct
  source 1..42: mol_type = other DNA
tgtgccagcagccctggggggggctatgctgagcagttcttc

SEQ ID NO: 32442 - DNA, 45 bp, synthetic construct
  source 1..45: mol_type = other DNA
tgtgctctgggtgattctggaggaagcaatgcaaagctaaccttc

SEQ ID NO: 32443 - DNA, 33 bp, synthetic construct
  source 1..33: mol_type = other DNA
tgtgccagcaggagggaaaacaccttgtacttt

SEQ ID NO: 32444 - DNA, 42 bp, synthetic construct
  source 1..42: mol_type = other DNA
tgcgcagtcagtgcggatacaggaaactacaaatacgtcttt

SEQ ID NO: 32445 - DNA, 36 bp, synthetic construct
  source 1..36: mol_type = other DNA
tgtgccagcagggggcctggaaatacgctctatttt

SEQ ID NO: 32446 - DNA, 45 bp, synthetic construct
  source 1..45: mol_type = other DNA
tgtgcagtgagcccttctaacagtgcagggaacaagctaactttt

SEQ ID NO: 32447 - DNA, 39 bp, synthetic construct
  source 1..39: mol_type = other DNA
tgtgccagcagtaagggacaggggggggaacagtacttc

SEQ ID NO: 32448 - DNA, 45 bp, synthetic construct
  source 1..45: mol_type = other DNA
tgtgctgccaggccggtatctggtagcttcaataagttgaccttt

SEQ ID NO: 32449 - DNA, 45 bp, synthetic construct
  source 1..45: mol_type = other DNA
tgtgccagcagtcgggacaggggaaacaccgggcagctctacttt

SEQ ID NO: 32450 - DNA, 36 bp, synthetic construct
  source 1..36: mol_type = other DNA
tgtgctcttgaagggggttaccagaacttctatttt

SEQ ID NO: 32451 - DNA, 42 bp, synthetic construct
  source 1..42: mol_type = other DNA
tgtgccagcagtgaagacaatgcaaactccgactacaccttc

SEQ ID NO: 32452 - DNA, 45 bp, synthetic construct
  source 1..45: mol_type = other DNA
tgtgctatgagagagggggacacaaatgcttacaaagtcatcttt

SEQ ID NO: 32453 - DNA, 48 bp, synthetic construct
  source 1..48: mol_type = other DNA
tgtgccagcagtgaagactggggggaaaacaccgggcagctctacttt

SEQ ID NO: 32454 - DNA, 36 bp, synthetic construct; identical to SEQ ID NO: 32380
  source 1..36: mol_type = other DNA

SEQ ID NO: 32455 - DNA, 48 bp, synthetic construct; identical to SEQ ID NO: 32453
  source 1..48: mol_type = other DNA

SEQ ID NO: 32456 - DNA, 45 bp, synthetic construct
  source 1..45: mol_type = other DNA
tgtgcagcaagctatgcatcctcctccttcagcaagctggtgttt

SEQ ID NO: 32457 - DNA, 42 bp, synthetic construct
  source 1..42: mol_type = other DNA
tgtgccagcagtgaagggacaacaaacacagaagtcttcttt

SEQ ID NO: 32458 - DNA, 36 bp, synthetic construct
  source 1..36: mol_type = other DNA
tgtgcagtggaaaattctgggacttaccagaggttt

SEQ ID NO: 32459 - DNA, 42 bp, synthetic construct
  source 1..42: mol_type = other DNA
tgtgccagcagtgaataccaggggagctccgactacaccttc

SEQ ID NO: 32460 - DNA, 36 bp, synthetic construct
  source 1..36: mol_type = other DNA
tgtgctttggcggccaataccaacaaagtcgtcttt

SEQ ID NO: 32461 - DNA, 39 bp, synthetic construct
  source 1..39: mol_type = other DNA
tgtgccagcagtgacaggtcaaacacagaagtcttcttt

SEQ ID NO: 32462 - DNA, 39 bp, synthetic construct
  source 1..39: mol_type = other DNA
tgcgcagtcaggaacacaaatgcttacaaagtcatcttt

SEQ ID NO: 32463 - DNA, 45 bp, synthetic construct
  source 1..45: mol_type = other DNA
tgtgccagcagtgacccagggaggggagacacagaagtcttcttt

SEQ ID NO: 32464 - DNA, 39 bp, synthetic construct
  source 1..39: mol_type = other DNA
tgctcagtcgccgggactggaggctataaagtggtcttt

SEQ ID NO: 32465 - DNA, 48 bp, synthetic construct
  source 1..48: mol_type = other DNA
tgtgccagcagtgacgagggacagcagctccccgaaagattatttttc

SEQ ID NO: 32466 - DNA, 36 bp, synthetic construct
  source 1..36: mol_type = other DNA
tgtgttttgagcgggagcaactatcagttgatctgg

SEQ ID NO: 32467 - DNA, 36 bp, synthetic construct
  source 1..36: mol_type = other DNA
tgtgccagcagtgacgggggttatgaacagtacttc

SEQ ID NO: 32468 - DNA, 36 bp, synthetic construct
  source 1..36: mol_type = other DNA
tgtatcctgtccccgggttaccagaacttctatttt

SEQ ID NO: 32469 - DNA, 45 bp, synthetic construct
  source 1..45: mol_type = other DNA
tgtgccagcagtgagagacagggttataattcgcccctctacttt

SEQ ID NO: 32470 - DNA, 39 bp, synthetic construct
  source 1..39: mol_type = other DNA
tgtgctctgggcaactatggaaatgagaaaataactttt

SEQ ID NO: 32471 - DNA, 45 bp, synthetic construct
  source 1..45: mol_type = other DNA
tgtgccagcagtgagctggggggtagtgcagaaacgctgtatttt

SEQ ID NO: 32472 - DNA, 45 bp, synthetic construct
  source 1..45: mol_type = other DNA
tgtgctctgagtgagaggggaggaagcaatgcaaagctaaccttc

SEQ ID NO: 32473 - DNA, 39 bp, synthetic construct
  source 1..39: mol_type = other DNA
tgtgccagcagtgagggggtctcctatgaacagtacttc

SEQ ID NO: 32474 - DNA, 45 bp, synthetic construct
  source 1..45: mol_type = other DNA
tgcgcagtcaggccctggggggcaggaaactacaaatacgtcttt

SEQ ID NO: 32475 - DNA, 30 bp, synthetic construct
  source 1..30: mol_type = other DNA
tgtgccagcagtgataaagaagtcttcttt

SEQ ID NO: 32476 - DNA, 39 bp, synthetic construct
  source 1..39: mol_type = other DNA
tgtgctctgggtggcccgggttaccagaacttctatttt

SEQ ID NO: 32477 - DNA, 42 bp, synthetic construct
  source 1..42: mol_type = other DNA
tgtgccagcagtgatacagggtacaccgggcagctctacttt

SEQ ID NO: 32478 - DNA, 39 bp, synthetic construct
  source 1..39: mol_type = other DNA
tgtgctgcgaggactggaggcaataataagctgactttt

SEQ ID NO: 32479 - DNA, 42 bp, synthetic construct
  source 1..42: mol_type = other DNA
tgtgccagcagtgatacgactagtcaaaacaccttgtacttt

SEQ ID NO: 32480 - DNA, 45 bp, synthetic construct
  source 1..45: mol_type = other DNA
tgtgcagcaagggaaggggggggcagtggcaacaagctcatcttt

SEQ ID NO: 32481 - DNA, 42 bp, synthetic construct
  source 1..42: mol_type = other DNA
tgtgccagcagtgatactgggggggcggacacccagtacttt

SEQ ID NO: 32482 - DNA, 36 bp, synthetic construct
  source 1..36: mol_type = other DNA
tgtgctctgggatctaattacaacgtgctttacttc

SEQ ID NO: 32483 - DNA, 48 bp, synthetic construct
  source 1..48: mol_type = other DNA
tgtgccagcagtgataggggacagggaagtgcagaaacgctgtatttt

SEQ ID NO: 32484 - DNA, 45 bp, synthetic construct
  source 1..45: mol_type = other DNA
tgtgctatgaggggaggggggactggaggctataaagtggtcttt

SEQ ID NO: 32485 - DNA, 39 bp, synthetic construct
  source 1..39: mol_type = other DNA
tgtgccagcagtgatccagggcacacagaagtcttcttt

SEQ ID NO: 32486 - DNA, 45 bp, synthetic construct
  source 1..45: mol_type = other DNA
tgtgctgtgagcccagcatcctcctccttcagcaagctggtgttt

SEQ ID NO: 32487 - DNA, 42 bp, synthetic construct
  source 1..42: mol_type = other DNA
tgtgccagcagtgatctgacagggccagaaacgctgtatttt

SEQ ID NO: 32488 - DNA, 36 bp, synthetic construct
  source 1..36: mol_type = other DNA
tgtgcagtgagagggggaggcagagctctgatattt

SEQ ID NO: 32489 - DNA, 36 bp, synthetic construct
  source 1..36: mol_type = other DNA
tgtgccagcagtgatgaagaatatgaacagtacttc

SEQ ID NO: 32490 - DNA, 39 bp, synthetic construct
  source 1..39: mol_type = other DNA
tgtgctctgggtgaggccaataccaacaaagtcgtcttt

SEQ ID NO: 32491 - DNA, 45 bp, synthetic construct
  source 1..45: mol_type = other DNA
tgtgccagcagtgatgcacgggacaaccaagacacccagtacttt

SEQ ID NO: 32492 - DNA, 48 bp, synthetic construct
  source 1..48: mol_type = other DNA
tgtgctatgagagagggcggagactatggaaatgagaaaataactttt

SEQ ID NO: 32493 - DNA, 45 bp, synthetic construct
  source 1..45: mol_type = other DNA
tgtgccagcagtgatgcactgggggggggctatgaacagtacttc

SEQ ID NO: 32494 - DNA, 39 bp, synthetic construct
  source 1..39: mol_type = other DNA
tgcgcagtcacctcttccaataccaacaaagtcgtcttt

SEQ ID NO: 32495 - DNA, 36 bp, synthetic construct
  source 1..36: mol_type = other DNA
tgtgccagcagtgatgcagactccgactacaccttc

SEQ ID NO: 32496 - DNA, 33 bp, synthetic construct
  source 1..33: mol_type = other DNA
tgctcaggcactgggagtaacaggctcactttt

SEQ ID NO: 32497 - DNA, 39 bp, synthetic construct
  source 1..39: mol_type = other DNA
tgtgccagcagtgatgcaggggacgaaagattatttttc

SEQ ID NO: 32498 - DNA, 45 bp, synthetic construct
  source 1..45: mol_type = other DNA
tgtgctttgagtgatcggggaaactatgcccagggattaaccttc

SEQ ID NO: 32499 - DNA, 39 bp, synthetic construct
  source 1..39: mol_type = other DNA
tgtgccagcagtgatgcgggggggcgtgaacagtacttc

SEQ ID NO: 32500 - DNA, 39 bp, synthetic construct
  source 1..39: mol_type = other DNA
tgtgctctgagtgagagcatgggctacaaacttaccttc

SEQ ID NO: 32501 - DNA, 42 bp, synthetic construct
  source 1..42: mol_type = other DNA
tgtgccagcagtgatggaggtgcaaacacagaagtcttcttt

SEQ ID NO: 32502 - DNA, 36 bp, synthetic construct
  source 1..36: mol_type = other DNA
tgtatcctgagagtaggcaattacaaactgacattt

SEQ ID NO: 32503 - DNA, 36 bp, synthetic construct
  source 1..36: mol_type = other DNA
tgtgccagcagtgatggatcctatgaacagtacttc

SEQ ID NO: 32504 - DNA, 45 bp, synthetic construct
  source 1..45: mol_type = other DNA
tgtgctttgagtgatcgggaacagggaggcagagctctgatattt

SEQ ID NO: 32505 - DNA, 39 bp, synthetic construct
  source 1..39: mol_type = other DNA
tgtgccagcagtgatggccagggaggggaacagtacttc

SEQ ID NO: 32506 - DNA, 42 bp, synthetic construct
  source 1..42: mol_type = other DNA
tgtgctctgagaactaacagtgcagggaacaagctaactttt

SEQ ID NO: 32507 - DNA, 48 bp, synthetic construct
  source 1..48: mol_type = other DNA
tgtgccagcagtgatgtaggactggggagccaagacacccagtacttt

SEQ ID NO: 32508 - DNA, 39 bp, synthetic construct
  source 1..39: mol_type = other DNA
tgtgctctgggtgcctatggaaatgagaaaataactttt

SEQ ID NO: 32509 - DNA, 36 bp, synthetic construct
  source 1..36: mol_type = other DNA
tgtgccagcagtgatgttggggatgaacagtacttc

SEQ ID NO: 32510 - DNA, 42 bp, synthetic construct
  source 1..42: mol_type = other DNA
tgcgcagtcagtgctaatacaggaaactacaaatacgtcttt

SEQ ID NO: 32511 - DNA, 45 bp, synthetic construct
  source 1..45: mol_type = other DNA
tgtgccagcagtgatgttgggggtaaccaagacacccagtacttt

SEQ ID NO: 32512 - DNA, 42 bp, synthetic construct
  source 1..42: mol_type = other DNA
tgtgctctgagtgatgggactggaggctataaagtggtcttt

SEQ ID NO: 32513 - DNA, 45 bp, synthetic construct
  source 1..45: mol_type = other DNA
tgtgccagcagtgccgggactggggggtttgctgagcagttcttc

SEQ ID NO: 32514 - DNA, 36 bp, synthetic construct
  source 1..36: mol_type = other DNA
tgtgctgtgagacctggcagctggcaactcatcttt

SEQ ID NO: 32515 - DNA, 42 bp, synthetic construct
  source 1..42: mol_type = other DNA
tgtgccagcagtggggacagtgcaaacacagaagtcttcttt

SEQ ID NO: 32516 - DNA, 45 bp, synthetic construct
  source 1..45: mol_type = other DNA
tgtgcagcaagtcgggctactggaggcaataataagctgactttt

SEQ ID NO: 32517 - DNA, 42 bp, synthetic construct
  source 1..42: mol_type = other DNA
tgtgccagcagtgggggactgtcaaactccgactacaccttc

SEQ ID NO: 32518 - DNA, 42 bp, synthetic construct
  source 1..42: mol_type = other DNA
tgtgctatgagagatagcaattctgggacttaccagaggttt

SEQ ID NO: 32519 - DNA, 42 bp, synthetic construct
  source 1..42: mol_type = other DNA
tgtgccagcagtgggggaggagagaactccgactacaccttc

SEQ ID NO: 32520 - DNA, 45 bp, synthetic construct
  source 1..45: mol_type = other DNA
tgcgctctctcggctcctagcaacatgggctacaaacttaccttc

SEQ ID NO: 32521 - DNA, 39 bp, synthetic construct
  source 1..39: mol_type = other DNA
tgtgccagcagtggggggactggaaatacgctctatttt

SEQ ID NO: 32522 - DNA, 45 bp, synthetic construct
  source 1..45: mol_type = other DNA
tgcgcagtcaaaaacactggagctaacactggaaagctcacgttt

SEQ ID NO: 32523 - DNA, 33 bp, synthetic construct
  source 1..33: mol_type = other DNA
tgtgccagcaagggggctaatgaacagtacttc

SEQ ID NO: 32524 - DNA, 51 bp, synthetic construct; identical to SEQ ID NO: 31538
  source 1..51: mol_type = other DNA

SEQ ID NO: 32525 - DNA, 36 bp, synthetic construct
  source 1..36: mol_type = other DNA
tgtgccagcaccaattctggaaatacgctctatttt

SEQ ID NO: 32526 - DNA, 48 bp, synthetic construct
  source 1..48: mol_type = other DNA
tgtgctatagataggaatactggaggactaagtggtaaattaacattc

SEQ ID NO: 32527 - DNA, 39 bp, synthetic construct
  source 1..39: mol_type = other DNA
tgtgccagcaccgggacaacaaactccgactacaccttc

SEQ ID NO: 32528 - DNA, 39 bp, synthetic construct
  source 1..39: mol_type = other DNA
tgtgctatggaacagaactatgcccagggattaaccttc

SEQ ID NO: 32529 - DNA, 42 bp, synthetic construct
  source 1..42: mol_type = other DNA
tgtgccagcacgcacaggggaagtcaaaacaccttgtacttt

SEQ ID NO: 32530 - DNA, 42 bp, synthetic construct
  source 1..42: mol_type = other DNA
tgtgctctgggggctactggaggcaataataagctgactttt

SEQ ID NO: 32531 - DNA, 33 bp, synthetic construct
  source 1..33: mol_type = other DNA
tgtgccagcagcatctcctatgaacagtacttc

SEQ ID NO: 32532 - DNA, 42 bp, synthetic construct
  source 1..42: mol_type = other DNA
tgcgcaaccatgcagcaaggcactgggtctaagctgtcattt

SEQ ID NO: 32533 - DNA, 42 bp, synthetic construct
  source 1..42: mol_type = other DNA
tgtgccagcagcccagggggctggaattcgcccctctacttt

SEQ ID NO: 32534 - DNA, 48 bp, synthetic construct
  source 1..48: mol_type = other DNA
tgtgcagtgagcccgcgggcaggcactgggagtaacaggctcactttt

SEQ ID NO: 32535 - DNA, 45 bp, synthetic construct
  source 1..45: mol_type = other DNA
tgtgccagcagcccctcggacagaagtcaaaacaccttgtacttt

SEQ ID NO: 32536 - DNA, 39 bp, synthetic construct
  source 1..39: mol_type = other DNA
tgtgttttgagcgcgggtagcaataacagaatcttcttt

SEQ ID NO: 32537 - DNA, 42 bp, synthetic construct
  source 1..42: mol_type = other DNA
tgtgccagcagcgacagggggaaccaagacacccagtacttt

SEQ ID NO: 32538 - DNA, 45 bp, synthetic construct
  source 1..45: mol_type = other DNA
tgtgctatgaggggcggaggctatggaaatgagaaaataactttt

SEQ ID NO: 32539 - DNA, 39 bp, synthetic construct
  source 1..39: mol_type = other DNA
tgtgccagcagcgctgacaggaacgaaagattatttttc

SEQ ID NO: 32540 - DNA, 39 bp, synthetic construct
  source 1..39: mol_type = other DNA
tgtgctatgagggggaataacaacaatgccccacgattt

SEQ ID NO: 32541 - DNA, 45 bp, synthetic construct
  source 1..45: mol_type = other DNA
tgtgccagcagctcgttgggggggcgtcaaaacaccttgtacttt

SEQ ID NO: 32542 - DNA, 48 bp, synthetic construct
  source 1..48: mol_type = other DNA
tgtgctatgagagagggcccgaacacgggttaccagaacttctatttt

SEQ ID NO: 32543 - DNA, 39 bp, synthetic construct
  source 1..39: mol_type = other DNA
tgtgccagcagctggacagcaaacacagaagtcttcttt

SEQ ID NO: 32544 - DNA, 45 bp, synthetic construct
  source 1..45: mol_type = other DNA
tgtgcactggagggtattcaaggcactgggtctaagctgtcattt

SEQ ID NO: 32545 - DNA, 48 bp, synthetic construct
  source 1..48: mol_type = other DNA
tgtgccagcaggagagggactgggggactccaagacacccagtacttt

SEQ ID NO: 32546 - DNA, 45 bp, synthetic construct
  source 1..45: mol_type = other DNA
tgtatcctgagatcctttactggcagtggtggaaaactcactttg

SEQ ID NO: 32547 - DNA, 33 bp, synthetic construct
  source 1..33: mol_type = other DNA
tgtgccagcaggaggcagacagaagtcttcttt

SEQ ID NO: 32548 - DNA, 42 bp, synthetic construct
  source 1..42: mol_type = other DNA
tgtgctctgggtgaaactggcagtggtggaaaactcactttg

SEQ ID NO: 32549 - DNA, 39 bp, synthetic construct
  source 1..39: mol_type = other DNA
tgtgccagcaggccgggactcaaccaggctccgcttttt

SEQ ID NO: 32550 - DNA, 42 bp, synthetic construct
  source 1..42: mol_type = other DNA
tgtgctacagatactgacacaaatgcttacaaagtcatcttt

SEQ ID NO: 32551 - DNA, 39 bp, synthetic construct; identical to SEQ ID NO: 31883
  source 1..39: mol_type = other DNA

SEQ ID NO: 32552 - DNA, 42 bp, synthetic construct
  source 1..42: mol_type = other DNA
tgtgctctgggggcatcctcctccttcagcaagctggtgttt

SEQ ID NO: 32553 - DNA, 39 bp, synthetic construct
  source 1..39: mol_type = other DNA
tgtgccagcagggacaggggacgtgctgagcagttcttc

SEQ ID NO: 32554 - DNA, 39 bp, synthetic construct
  source 1..39: mol_type = other DNA
tgtgttttgagtactggaggcaataataagctgactttt

SEQ ID NO: 32555 - DNA, 36 bp, synthetic construct
  source 1..36: mol_type = other DNA
tgtgccagcagggacagggggaatgaacagtacttc

SEQ ID NO: 32556 - DNA, 48 bp, synthetic construct
  source 1..48: mol_type = other DNA
tgtgcactggagggtatagcatcctcctccttcagcaagctggtgttt

SEQ ID NO: 32557 - DNA, 42 bp, synthetic construct
  source 1..42: mol_type = other DNA
tgtgccagcagggacagggggagtcaaaacaccttgtacttt

SEQ ID NO: 32558 - DNA, 39 bp, synthetic construct
  source 1..39: mol_type = other DNA
tgtgctatgagagaaggaggcaataataagctgactttt

SEQ ID NO: 32559 - DNA, 42 bp, synthetic construct; identical to SEQ ID NO: 32557
  source 1..42: mol_type = other DNA

SEQ ID NO: 32560 - DNA, 42 bp, synthetic construct
  source 1..42: mol_type = other DNA
tgtgctatgccccatcaaggagggtctgcgaagctcatcttt

SEQ ID NO: 32561 - DNA, 36 bp, synthetic construct
  source 1..36: mol_type = other DNA
tgtgccagcagggacagtcaaaacaccttgtacttt

SEQ ID NO: 32562 - DNA, 48 bp, synthetic construct
  source 1..48: mol_type = other DNA
tgtgctttgagtgatctggctaacagtgcagggaacaagctaactttt

SEQ ID NO: 32563 - DNA, 42 bp, synthetic construct; identical to SEQ ID NO: 31493
  source 1..42: mol_type = other DNA

SEQ ID NO: 32564 - DNA, 33 bp, synthetic construct; identical to SEQ ID NO: 31900
  source 1..33: mol_type = other DNA

SEQ ID NO: 32565 - DNA, 42 bp, synthetic construct; identical to SEQ ID NO: 31493
  source 1..42: mol_type = other DNA

SEQ ID NO: 32566 - DNA, 36 bp, synthetic construct; identical to SEQ ID NO: 31494
  source 1..36: mol_type = other DNA

SEQ ID NO: 32567 - DNA, 42 bp, synthetic construct; identical to SEQ ID NO: 31493
  source 1..42: mol_type = other DNA

SEQ ID NO: 32568 - DNA, 36 bp, synthetic construct; identical to SEQ ID NO: 31494
  source 1..36: mol_type = other DNA

SEQ ID NO: 32569 - DNA, 45 bp, synthetic construct
  source 1..45: mol_type = other DNA
tgtgccagcagggggacaggatcctataattcgcccctctacttt

SEQ ID NO: 32570 - DNA, 39 bp, synthetic construct
  source 1..39: mol_type = other DNA
tgtgctatgagagagggcggcaataacagaatcttcttt

SEQ ID NO: 32571 - DNA, 45 bp, synthetic construct
  source 1..45: mol_type = other DNA
tgtgccagcagtaacagggggcgcctctcctatgaacagtacttc

SEQ ID NO: 32572 - DNA, 24 bp, synthetic construct
  source 1..24: mol_type = other DNA
tgtgcagtgcacgtgctttacttc

SEQ ID NO: 32573 - DNA, 45 bp, synthetic construct; identical to SEQ ID NO: 31521
  source 1..45: mol_type = other DNA

SEQ ID NO: 32574 - DNA, 36 bp, synthetic construct; identical to SEQ ID NO: 31522
  source 1..36: mol_type = other DNA

SEQ ID NO: 32575 - DNA, 42 bp, synthetic construct
  source 1..42: mol_type = other DNA
tgtgccagcagtcaagggacaggggattcgcccctctacttt

SEQ ID NO: 32576 - DNA, 42 bp, synthetic construct
  source 1..42: mol_type = other DNA
tgtgctatgagagccccttccaataccgacaaagtcgtcttt

SEQ ID NO: 32577 - DNA, 39 bp, synthetic construct
  source 1..39: mol_type = other DNA
tgtgccagcagtccagggggcaaccaggctccgcttttt

SEQ ID NO: 32578 - DNA, 42 bp, synthetic construct
  source 1..42: mol_type = other DNA
tgtgctatgagagaggcctccaataccgacaaagtcgtcttt

SEQ ID NO: 32579 - DNA, 42 bp, synthetic construct
  source 1..42: mol_type = other DNA
tgtgccagcagtccgggcattaacaaccaggctccgcttttt

SEQ ID NO: 32580 - DNA, 42 bp, synthetic construct
  source 1..42: mol_type = other DNA
tgtgcagcaagtcctggagctaacactggaaagctcacgttt

SEQ ID NO: 32581 - DNA, 45 bp, synthetic construct
  source 1..45: mol_type = other DNA
tgtgccagcagtcgacagggaatttccaacgaaagattatttttc

SEQ ID NO: 32582 - DNA, 45 bp, synthetic construct
  source 1..45: mol_type = other DNA
tgtgctgtgagcgcgactaatacaggaaactacaaatacgtcttt

SEQ ID NO: 32583 - DNA, 48 bp, synthetic construct
  source 1..48: mol_type = other DNA
tgtgccagcagtctccgggcagggcgaagtgcagaaacgctgtatttt

SEQ ID NO: 32584 - DNA, 42 bp, synthetic construct
  source 1..42: mol_type = other DNA
tgtgcagcaagtacctcaggaggaaactacaaacctacgttt

SEQ ID NO: 32585 - DNA, 36 bp, synthetic construct
  source 1..36: mol_type = other DNA
tgtgccagcagtgaaaaggactccgactacaccttc

SEQ ID NO: 32586 - DNA, 42 bp, synthetic construct
  source 1..42: mol_type = other DNA
tgtgctgtcatgactaacagtgcagggaacaagctaactttt

SEQ ID NO: 32587 - DNA, 45 bp, synthetic construct
  source 1..45: mol_type = other DNA
tgtgccagcagtgaaacagaatctagtgcagaaacgctgtatttt

SEQ ID NO: 32588 - DNA, 39 bp, synthetic construct
  source 1..39: mol_type = other DNA
tgtgcagtgagcatgactggcagctggcaactcatcttt

SEQ ID NO: 32589 - DNA, 36 bp, synthetic construct
  source 1..36: mol_type = other DNA
tgtgccagcagtgaacggtacgggcagctctacttt

SEQ ID NO: 32590 - DNA, 39 bp, synthetic construct
  source 1..39: mol_type = other DNA
tgtgctactgatacaggaggtgcagatagactcaccttt

SEQ ID NO: 32591 - DNA, 36 bp, synthetic construct
  source 1..36: mol_type = other DNA
tgtgccagcagtgaaggaaactccgactacaccttc

SEQ ID NO: 32592 - DNA, 33 bp, synthetic construct
  source 1..33: mol_type = other DNA
tgtgctactgggggcaacaacagacttactttg

SEQ ID NO: 32593 - DNA, 39 bp, synthetic construct
  source 1..39: mol_type = other DNA
tgtgccagcagtgaaggggtaaacacagaagtcttcttt

SEQ ID NO: 32594 - DNA, 48 bp, synthetic construct
  source 1..48: mol_type = other DNA
tgtgctctgggtgatcgagtctatacaggaaactacaaatacgtcttt

SEQ ID NO: 32595 - DNA, 39 bp, synthetic construct
  source 1..39: mol_type = other DNA
tgtgccagcagtgacaggattggaaatacgctctatttt

SEQ ID NO: 32596 - DNA, 39 bp, synthetic construct
  source 1..39: mol_type = other DNA
tgtgctctgggtgactataaccaggggaagcttatcttt

SEQ ID NO: 32597 - DNA, 39 bp, synthetic construct
  source 1..39: mol_type = other DNA
tgtgccagcagtgagactgggggctatgaacagtacttc

SEQ ID NO: 32598 - DNA, 39 bp, synthetic construct
  source 1..39: mol_type = other DNA
tgtgctatgcagcaaggcactgggtctaagctgtcattt

SEQ ID NO: 32599 - DNA, 45 bp, synthetic construct
  source 1..45: mol_type = other DNA
tgtgccagcagtgaggccgggacagggggcagggaacagtacttc

SEQ ID NO: 32600 - DNA, 42 bp, synthetic construct
  source 1..42: mol_type = other DNA
tgtgcagcaagtacggattataaccaggggaagcttatcttt

SEQ ID NO: 32601 - DNA, 45 bp, synthetic construct
  source 1..45: mol_type = other DNA
tgtgccagcagtgaggggggtgcaaacaccgggcagctctacttt

SEQ ID NO: 32602 - DNA, 42 bp, synthetic construct
  source 1..42: mol_type = other DNA
tgtgctttgagtgagggtaactatgcccagggattaaccttc

SEQ ID NO: 32603 - DNA, 45 bp, synthetic construct
  source 1..45: mol_type = other DNA
tgtgccagcagtgatacaggggaaggggactatgaacagtacttc

SEQ ID NO: 32604 - DNA, 42 bp, synthetic construct
  source 1..42: mol_type = other DNA
tgtgctatggacggatcttctggcagctggcaactcatcttt

SEQ ID NO: 32605 - DNA, 39 bp, synthetic construct
  source 1..39: mol_type = other DNA
tgtgccagcagtgataggggaaacacagaagtcttcttt

SEQ ID NO: 32606 - DNA, 36 bp, synthetic construct
  source 1..36: mol_type = other DNA
tgtgcagtaactggaggcaataataagctgactttt

SEQ ID NO: 32607 - DNA, 39 bp, synthetic construct
  source 1..39: mol_type = other DNA
tgtgccagcagtgatcacgcaaacacagaagtcttcttt

SEQ ID NO: 32608 - DNA, 45 bp, synthetic construct
  source 1..45: mol_type = other DNA
tgtgctatgagaggggcggactcgggatacaacaaactcactttt

SEQ ID NO: 32609 - DNA, 45 bp, synthetic construct
  source 1..45: mol_type = other DNA
tgtgccagcagtgatccgggacagggaaacacagaagtcttcttt

SEQ ID NO: 32610 - DNA, 42 bp, synthetic construct
  source 1..42: mol_type = other DNA
tgtgctatgagagagactggaggcaataataagctgactttt

SEQ ID NO: 32611 - DNA, 42 bp, synthetic construct
  source 1..42: mol_type = other DNA
tgtgccagcagtgatgaaaagggggcagaaacgctgtatttt

SEQ ID NO: 32612 - DNA, 42 bp, synthetic construct
  source 1..42: mol_type = other DNA
tgtgttctgggtataacaggcaatactagaaaactcatcttt

SEQ ID NO: 32613 - DNA, 45 bp, synthetic construct
  source 1..45: mol_type = other DNA
tgtgccagcagtgatgactgggggaactatgctgagcagttcttc

SEQ ID NO: 32614 - DNA, 36 bp, synthetic construct
  source 1..36: mol_type = other DNA
tgtgctgtaaacagtgcagggaacaagctaactttt

SEQ ID NO: 32615 - DNA, 45 bp, synthetic construct
  source 1..45: mol_type = other DNA
tgtgccagcagtgatgaggggcgcgatgcagaaacgctgtatttt

SEQ ID NO: 32616 - DNA, 42 bp, synthetic construct
  source 1..42: mol_type = other DNA
tgtgctctgggggagacaggctttgcaagtgcgctgacattt

SEQ ID NO: 32617 - DNA, 42 bp, synthetic construct
  source 1..42: mol_type = other DNA
tgtgccagcagtgatgaggggggaagggacacccagtacttt

SEQ ID NO: 32618 - DNA, 36 bp, synthetic construct
  source 1..36: mol_type = other DNA
tgtgcagctagtgacggtgcttacaaagtcatcttt

SEQ ID NO: 32619 - DNA, 33 bp, synthetic construct
  source 1..33: mol_type = other DNA
tgtgccagcagtgatgcagatgaacagtacttc

SEQ ID NO: 32620 - DNA, 33 bp, synthetic construct
  source 1..33: mol_type = other DNA
tgtgctcttgacaatgcttacaaagtcatcttt

SEQ ID NO: 32621 - DNA, 39 bp, synthetic construct
  source 1..39: mol_type = other DNA
tgtgccagcagtgatgcagcaaactccgactacaccttc

SEQ ID NO: 32622 - DNA, 39 bp, synthetic construct
  source 1..39: mol_type = other DNA
tgtgctgctgagagcacgggttaccagaacttctatttt

SEQ ID NO: 32623 - DNA, 48 bp, synthetic construct; identical to SEQ ID NO: 31689
  source 1..48: mol_type = other DNA

SEQ ID NO: 32624 - DNA, 36 bp, synthetic construct
  source 1..36: mol_type = other DNA
tgtgctgcaaaaggagggtctgcgaagctcatcttt

SEQ ID NO: 32625 - DNA, 48 bp, synthetic construct
  source 1..48: mol_type = other DNA
tgtgccagcagtgatgcctacaggggtgttggaaatacgctctatttt

SEQ ID NO: 32626 - DNA, 42 bp, synthetic construct
  source 1..42: mol_type = other DNA
tgtgcagtgagcatgacaggcaataccggaaaactcatcttt

SEQ ID NO: 32627 - DNA, 39 bp, synthetic construct
  source 1..39: mol_type = other DNA
tgtgccagcagtgatgcgggatccgaaagattatttttc

SEQ ID NO: 32628 - DNA, 39 bp, synthetic construct
  source 1..39: mol_type = other DNA
tgtgctctgggcgagaatagcaataacagaatcttcttt

SEQ ID NO: 32629 - DNA, 45 bp, synthetic construct
  source 1..45: mol_type = other DNA
tgtgccagcagtgatgtacaaatttccaacgaaagattatttttc

SEQ ID NO: 32630 - DNA, 45 bp, synthetic construct; identical to SEQ ID NO: 32374
  source 1..45: mol_type = other DNA

SEQ ID NO: 32631 - DNA, 42 bp, synthetic construct; identical to SEQ ID NO: 31517
  source 1..42: mol_type = other DNA

SEQ ID NO: 32632 - DNA, 45 bp, synthetic construct; identical to SEQ ID NO: 32480
  source 1..45: mol_type = other DNA

SEQ ID NO: 32633 - DNA, 42 bp, synthetic construct; identical to SEQ ID NO: 31517
  source 1..42: mol_type = other DNA

SEQ ID NO: 32634 - DNA, 42 bp, synthetic construct; identical to SEQ ID NO: 31562
  source 1..42: mol_type = other DNA

SEQ ID NO: 32635 - DNA, 45 bp, synthetic construct
  source 1..45: mol_type = other DNA
tgtgccagcagtgatttggaagacgttcaaaacaccttgtacttt

SEQ ID NO: 32636 - DNA, 42 bp, synthetic construct
  source 1..42: mol_type = other DNA
tgtgctctggccctgaattataaccaggggaagcttatcttt

SEQ ID NO: 32637 - DNA, 36 bp, synthetic construct
  source 1..36: mol_type = other DNA
tgtgccagcagtgcagggggctccgactacaccttc

SEQ ID NO: 32638 - DNA, 39 bp, synthetic construct
  source 1..39: mol_type = other DNA
tgtgcagcaagcgggaataacaataacagaatcttcttt

SEQ ID NO: 32639 - DNA, 45 bp, synthetic construct
  source 1..45: mol_type = other DNA
tgtgccagcagtgcctccggacagggggcgcttgaacagtacttc

SEQ ID NO: 32640 - DNA, 45 bp, synthetic construct
  source 1..45: mol_type = other DNA
tgtgcagcaagtggggcatcctcctccttcagcaagctggtgttt

SEQ ID NO: 32641 - DNA, 48 bp, synthetic construct
  source 1..48: mol_type = other DNA
tgtgccagcagtgcggactgggggggcgcagaggctgagcagttcttc

SEQ ID NO: 32642 - DNA, 42 bp, synthetic construct
  source 1..42: mol_type = other DNA
tgtgctctgagtcccaatacaggaaactacaaatacgtcttt

SEQ ID NO: 32643 - DNA, 39 bp, synthetic construct
  source 1..39: mol_type = other DNA
tgtgccagcagtgcggcagcaaactccgactacaccttc

SEQ ID NO: 32644 - DNA, 45 bp, synthetic construct
  source 1..45: mol_type = other DNA
tgtgttttgagccgagttaatacaggaaactacaaatacgtcttt

SEQ ID NO: 32645 - DNA, 42 bp, synthetic construct
  source 1..42: mol_type = other DNA
tgtgccagcagtgctgggggggtccaagacacccagtacttt

SEQ ID NO: 32646 - DNA, 45 bp, synthetic construct
  source 1..45: mol_type = other DNA
tgtgctatgagagagaataataatgcaggtgccaagctcacattc

SEQ ID NO: 32647 - DNA, 45 bp, synthetic construct
  source 1..45: mol_type = other DNA
tgtgccagcagtggacagggtgggagtcaaaacaccttgtacttt

SEQ ID NO: 32648 - DNA, 42 bp, synthetic construct
  source 1..42: mol_type = other DNA
tgtgctgcgaggtcctaccagggaggcagagctctgatattt

SEQ ID NO: 32649 - DNA, 39 bp, synthetic construct
  source 1..39: mol_type = other DNA
tgtgccagcagtggacagtataattcgcccctctacttt

SEQ ID NO: 32650 - DNA, 36 bp, synthetic construct
  source 1..36: mol_type = other DNA
tgtgctctgggtgaagacaataacagaatcttcttt

SEQ ID NO: 32651 - DNA, 36 bp, synthetic construct
  source 1..36: mol_type = other DNA
tgtgccagcagtggacctcaagacacccagtacttt

SEQ ID NO: 32652 - DNA, 48 bp, synthetic construct
  source 1..48: mol_type = other DNA
tgtgctctctgggagctagccgataactatgcccagggattaaccttc

SEQ ID NO: 32653 - DNA, 36 bp, synthetic construct; identical to SEQ ID NO: 32651
  source 1..36: mol_type = other DNA

SEQ ID NO: 32654 - DNA, 48 bp, synthetic construct
  source 1..48: mol_type = other DNA
tgtgctctgggtgatccccttaacagtgcagggaacaagctaactttt

SEQ ID NO: 32655 - DNA, 39 bp, synthetic construct
  source 1..39: mol_type = other DNA
tgtgccagcagtggagaggaaaactccgactacaccttc

SEQ ID NO: 32656 - DNA, 42 bp, synthetic construct
  source 1..42: mol_type = other DNA
tgtgcagcaagtccttcttccaataccaacaaagtcgtcttt

SEQ ID NO: 32657 - DNA, 48 bp, synthetic construct; identical to SEQ ID NO: 31897
  source 1..48: mol_type = other DNA

SEQ ID NO: 32658 - DNA, 42 bp, synthetic construct; identical to SEQ ID NO: 31478
  source 1..42: mol_type = other DNA

SEQ ID NO: 32659 - DNA, 48 bp, synthetic construct; identical to SEQ ID NO: 31897
  source 1..48: mol_type = other DNA

SEQ ID NO: 32660 - DNA, 36 bp, synthetic construct; identical to SEQ ID NO: 32420
  source 1..36: mol_type = other DNA

SEQ ID NO: 32661 - DNA, 45 bp, synthetic construct
  source 1..45: mol_type = other DNA
tgtgccagcagtgggcagggggcgctcgacgaaagattatttttc

SEQ ID NO: 32662 - DNA, 39 bp, synthetic construct
  source 1..39: mol_type = other DNA
tgtgctgctgacgataactatgcccagggattaaccttc

SEQ ID NO: 32663 - DNA, 36 bp, synthetic construct
  source 1..36: mol_type = other DNA
tgtgccagcagtggggacagctatgaacagtacttc

SEQ ID NO: 32664 - DNA, 42 bp, synthetic construct
  source 1..42: mol_type = other DNA
tgtgctttggaactggcagaaggtgcagatagactcaccttt

SEQ ID NO: 32665 - DNA, 45 bp, synthetic construct
  source 1..45: mol_type = other DNA
tgtgccagcagtggggacagggattataattcgcccctctacttt

SEQ ID NO: 32666 - DNA, 36 bp, synthetic construct
  source 1..36: mol_type = other DNA
tgcgcagtcagtgataacaacaatgccccacgattt

SEQ ID NO: 32667 - DNA, 42 bp, synthetic construct; identical to SEQ ID NO: 31479
  source 1..42: mol_type = other DNA

SEQ ID NO: 32668 - DNA, 45 bp, synthetic construct; identical to SEQ ID NO: 31760
  source 1..45: mol_type = other DNA

SEQ ID NO: 32669 - DNA, 42 bp, synthetic construct; identical to SEQ ID NO: 31479
  source 1..42: mol_type = other DNA

SEQ ID NO: 32670 - DNA, 42 bp, synthetic construct
  source 1..42: mol_type = other DNA
tgtgctttgtccccaaataactatgcccagggattaaccttc

SEQ ID NO: 32671 - DNA, 39 bp, synthetic construct
  source 1..39: mol_type = other DNA
tgtgccagcagtgtggggggggaaaacaccttgtacttt

SEQ ID NO: 32672 - DNA, 39 bp, synthetic construct
  source 1..39: mol_type = other DNA
tgtgctgcaccatcttctggcagctggcaactcatcttt

SEQ ID NO: 32673 - DNA, 42 bp, synthetic construct
  source 1..42: mol_type = other DNA
tgtgccagcagttccgggacaggggaccaggctccgcttttt

SEQ ID NO: 32674 - DNA, 48 bp, synthetic construct
  source 1..48: mol_type = other DNA
tgtgctatgagagagccgaatcaaggagggtctgcgaagctcatcttt

SEQ ID NO: 32675 - DNA, 45 bp, synthetic construct
  source 1..45: mol_type = other DNA
tgtgccagcagttggactgggggtagtgcagaaacgctgtatttt

SEQ ID NO: 32676 - DNA, 36 bp, synthetic construct
  source 1..36: mol_type = other DNA
tgtgctgtgaaaggagggtctgcgaagctcatcttt

SEQ ID NO: 32677 - DNA, 36 bp, synthetic construct
  source 1..36: mol_type = other DNA
tgtgccagcagttgggcaaactccgactacaccttc

SEQ ID NO: 32678 - DNA, 48 bp, synthetic construct; identical to SEQ ID NO: 26026
  source 1..48: mol_type = other DNA

SEQ ID NO: 32679 - DNA, 39 bp, synthetic construct
  source 1..39: mol_type = other DNA
tgtgccagcgccgggggagacaacgaaagattatttttc

SEQ ID NO: 32680 - DNA, 42 bp, synthetic construct
  source 1..42: mol_type = other DNA
tgtgctatgagagagaacacgggttaccagaacttctatttt

SEQ ID NO: 32681 - DNA, 33 bp, synthetic construct
  source 1..33: mol_type = other DNA
tgtgccagcggggggaacacagaagtcttcttt

SEQ ID NO: 32682 - DNA, 51 bp, synthetic construct
  source 1..51: mol_type = other DNA
tgtgctatgagagaggcctacagtggaggcagcaattacaaactgacattt

SEQ ID NO: 32683 - DNA, 42 bp, synthetic construct
  source 1..42: mol_type = other DNA
tgtgctagcagccccgggacagactatgctgagcagttcttc

SEQ ID NO: 32684 - DNA, 42 bp, synthetic construct
  source 1..42: mol_type = other DNA
tgcgcagtcagttcctaccagggaggcagagctctgatattt

SEQ ID NO: 32685 - DNA, 39 bp, synthetic construct
  source 1..39: mol_type = other DNA
tgtgctagcagtacagattctggaaatacgctctatttt

SEQ ID NO: 32686 - DNA, 48 bp, synthetic construct
  source 1..48: mol_type = other DNA
tgtgctatgagaggaaattctggaggaagcaatgcaaagctaaccttc

SEQ ID NO: 32687 - DNA, 42 bp, synthetic construct; identical to SEQ ID NO: 31771
  source 1..42: mol_type = other DNA

SEQ ID NO: 32688 - DNA, 45 bp, synthetic construct; identical to SEQ ID NO: 31602
  source 1..45: mol_type = other DNA

SEQ ID NO: 32689 - DNA, 51 bp, synthetic construct
  source 1..51: mol_type = other DNA
tgtgctagcagtagacggctgggggggcctagtgcagaaacgctgtatttt

SEQ ID NO: 32690 - DNA, 51 bp, synthetic construct
  source 1..51: mol_type = other DNA
tgtgctctgagtgatcgggtagcatcctcctccttcagcaagctggtgttt

SEQ ID NO: 32691 - DNA, 39 bp, synthetic construct
  source 1..39: mol_type = other DNA
tgtgctagcagtagagataactcctatgaacagtacttc

SEQ ID NO: 32692 - DNA, 39 bp, synthetic construct
  source 1..39: mol_type = other DNA
tgtgcagctaactaccagggaggcagagctctgatattt

SEQ ID NO: 32693 - DNA, 45 bp, synthetic construct
  source 1..45: mol_type = other DNA
tgtgctagcagtagagctccgacaattcaaaacaccttgtacttt

SEQ ID NO: 32694 - DNA, 45 bp, synthetic construct
  source 1..45: mol_type = other DNA
tgtgcagctagtggggggacaggctttgcaagtgcgctgacattt

SEQ ID NO: 32695 - DNA, 39 bp, synthetic construct
  source 1..39: mol_type = other DNA
tgtgctagcagtagaggaaaccaagacacccagtacttt

SEQ ID NO: 32696 - DNA, 39 bp, synthetic construct
  source 1..39: mol_type = other DNA
tgtgcaggcggggggggtagcaataacagaatcttcttt

SEQ ID NO: 32697 - DNA, 33 bp, synthetic construct
  source 1..33: mol_type = other DNA
tgtgctagcagtagccaatatgaacagtacttc

SEQ ID NO: 32698 - DNA, 36 bp, synthetic construct
  source 1..36: mol_type = other DNA
tgtgcactggagcagggaggcagagctctgatattt

SEQ ID NO: 32699 - DNA, 42 bp, synthetic construct
  source 1..42: mol_type = other DNA
tgtgctagcagtagggacaggggctatgctgagcagttcttc

SEQ ID NO: 32700 - DNA, 39 bp, synthetic construct
  source 1..39: mol_type = other DNA
tgtgctttggaaaataactatgcccagggattaaccttc

SEQ ID NO: 32701 - DNA, 45 bp, synthetic construct
  source 1..45: mol_type = other DNA
tgtgctagcagtagtaccgggacatctggaaatacgctctatttt

SEQ ID NO: 32702 - DNA, 42 bp, synthetic construct
  source 1..42: mol_type = other DNA
tgtgctatgagaagagggaataacaataacagaatcttcttt

SEQ ID NO: 32703 - DNA, 45 bp, synthetic construct
  source 1..45: mol_type = other DNA
tgtgctagcagtagtggggggcgaaactatgctgagcagttcttc

SEQ ID NO: 32704 - DNA, 39 bp, synthetic construct
  source 1..39: mol_type = other DNA
tgtgctctggcctataatgcaggtgccaagctcacattc

SEQ ID NO: 32705 - DNA, 30 bp, synthetic construct
  source 1..30: mol_type = other DNA
tgtgctagcagtggaagagaagtcttcttt

SEQ ID NO: 32706 - DNA, 42 bp, synthetic construct; identical to SEQ ID NO: 31476
  source 1..42: mol_type = other DNA

SEQ ID NO: 32707 - DNA, 36 bp, synthetic construct
  source 1..36: mol_type = other DNA
tgtgctagcagtgtcccgggacatgaacagtacttc

SEQ ID NO: 32708 - DNA, 42 bp, synthetic construct
  source 1..42: mol_type = other DNA
tgcgcagtcagagcaatgtctaattacaacgtgctttacttc

SEQ ID NO: 32709 - DNA, 39 bp, synthetic construct
  source 1..39: mol_type = other DNA
tgtgctggagggacagggggcgacgggcagctctacttt

SEQ ID NO: 32710 - DNA, 42 bp, synthetic construct
  source 1..42: mol_type = other DNA
tgtgctatgagagaggcaggcaataccggaaaactcatcttt

SEQ ID NO: 32711 - DNA, 21 bp, synthetic construct
  source 1..21: mol_type = other DNA
tgtgctggggaacagtacttc

SEQ ID NO: 32712 - DNA, 45 bp, synthetic construct
  source 1..45: mol_type = other DNA
tgtgctatgagacttcccaactatggaaatgagaaaataactttt

SEQ ID NO: 32713 - DNA, 36 bp, synthetic construct
  source 1..36: mol_type = other DNA
tgtgccagctctctcgaggcagacacccagtacttt

SEQ ID NO: 32714 - DNA, 45 bp, synthetic construct
  source 1..45: mol_type = other DNA
tgtgctgtgagcgctcaggggggcactgggtctaagctgtcattt

SEQ ID NO: 32715 - DNA, 45 bp, synthetic construct
  source 1..45: mol_type = other DNA
tgtgcctggagatcgacagggcggaatgcagaaacgctgtatttt

SEQ ID NO: 32716 - DNA, 42 bp, synthetic construct
  source 1..42: mol_type = other DNA
tgtgcagtgaccctctaccagggaggcagagctctgatattt

SEQ ID NO: 32717 - DNA, 51 bp, synthetic construct
  source 1..51: mol_type = other DNA
tgtgcctggagccctagggggctgggggggcccaccgggcagctctacttt

SEQ ID NO: 32718 - DNA, 42 bp, synthetic construct
  source 1..42: mol_type = other DNA
tgtgcagcaagtgaagcaggcactgggtctaagctgtcattt

SEQ ID NO: 32719 - DNA, 39 bp, synthetic construct; identical to SEQ ID NO: 31511
  source 1..39: mol_type = other DNA

SEQ ID NO: 32720 - DNA, 39 bp, synthetic construct; identical to SEQ ID NO: 31512
  source 1..39: mol_type = other DNA

SEQ ID NO: 32721 - DNA, 39 bp, synthetic construct
  source 1..39: mol_type = other DNA
tgtgcctggagtcaggctagtgcagaaacgctgtatttt

SEQ ID NO: 32722 - DNA, 36 bp, synthetic construct
  source 1..36: mol_type = other DNA
tgtgctgcaagtgactatgcaaacaagatgatcttt

SEQ ID NO: 32723 - DNA, 48 bp, synthetic construct; identical to SEQ ID NO: 31611
  source 1..48: mol_type = other DNA

SEQ ID NO: 32724 - DNA, 39 bp, synthetic construct
  source 1..39: mol_type = other DNA
tgtgctgcagttactggcagtggtggaaaactcactttg

SEQ ID NO: 32725 - DNA, 36 bp, synthetic construct
  source 1..36: mol_type = other DNA
tgtgcctggagtctaagggacaaagaagtcttcttt

SEQ ID NO: 32726 - DNA, 45 bp, synthetic construct
  source 1..45: mol_type = other DNA
tgtgctctgggtgcgggaggttcagccttagggaggctgcatttt

SEQ ID NO: 32727 - DNA, 51 bp, synthetic construct
  source 1..51: mol_type = other DNA
tgtgcctggagtctagtgactgggggggcgctctatgctgagcagttcttc

SEQ ID NO: 32728 - DNA, 51 bp, synthetic construct
  source 1..51: mol_type = other DNA
tgtgctatgagagaggttaattctggaggaagcaatgcaaagctaaccttc

SEQ ID NO: 32729 - DNA, 42 bp, synthetic construct
  source 1..42: mol_type = other DNA
tgtgcctggagtctcctgagtaactatgctgagcagttcttc

SEQ ID NO: 32730 - DNA, 42 bp, synthetic construct
  source 1..42: mol_type = other DNA
tgcgcagtcaggccgactggaggcaataataagctgactttt

SEQ ID NO: 32731 - DNA, 45 bp, synthetic construct
  source 1..45: mol_type = other DNA
tgtgcctggagtcttagggagaagggcaacgaaagattatttttc

SEQ ID NO: 32732 - DNA, 42 bp, synthetic construct; identical to SEQ ID NO: 31620
  source 1..42: mol_type = other DNA

SEQ ID NO: 32733 - DNA, 36 bp, synthetic construct
  source 1..36: mol_type = other DNA
tgtgcctggctgggagaccaagacacccagtacttt

SEQ ID NO: 32734 - DNA, 39 bp, synthetic construct
  source 1..39: mol_type = other DNA
tgtgccccccatgacacaaatgcttacaaagtcatcttt

SEQ ID NO: 32735 - DNA, 51 bp, synthetic construct
  source 1..51: mol_type = other DNA
tgtgccagcagcccccgggacagggggagtagtgcagaaacgctgtatttt

SEQ ID NO: 32736 - DNA, 39 bp, synthetic construct
  source 1..39: mol_type = other DNA
tgtgctgtgagcaattataaccaggggaagcttatcttt

SEQ ID NO: 32737 - DNA, 36 bp, synthetic construct
  source 1..36: mol_type = other DNA
tgtgccagcagccccgcaggggatgaacagtacttc

SEQ ID NO: 32738 - DNA, 42 bp, synthetic construct
  source 1..42: mol_type = other DNA
tgtgctgctccacccatgtctaattacaacgtgctttacttc

SEQ ID NO: 32739 - DNA, 45 bp, synthetic construct
  source 1..45: mol_type = other DNA
tgtgccagcagctcaggactgggggactatgctgagcagttcttc

SEQ ID NO: 32740 - DNA, 42 bp, synthetic construct
  source 1..42: mol_type = other DNA
tgtgctatgagtgggggggattctgggacttaccagaggttt

SEQ ID NO: 32741 - DNA, 48 bp, synthetic construct
  source 1..48: mol_type = other DNA
tgtgccagcagcttagaaggggggcggggtgcagaaacgctgtatttt

SEQ ID NO: 32742 - DNA, 45 bp, synthetic construct
  source 1..45: mol_type = other DNA
tgtgcagtggaggacagtggaggcagcaattacaaactgacattt

SEQ ID NO: 32743 - DNA, 48 bp, synthetic construct
  source 1..48: mol_type = other DNA
tgtgccagcagcttagcccgggacaggggttttgctgagcagttcttc

SEQ ID NO: 32744 - DNA, 42 bp, synthetic construct
  source 1..42: mol_type = other DNA
tgtgctgctgaggcgtcttctggcagctggcaactcatcttt

SEQ ID NO: 32745 - DNA, 48 bp, synthetic construct
  source 1..48: mol_type = other DNA
tgtgccagcagcttagcgctgggggatggcgcagaaacgctgtatttt

SEQ ID NO: 32746 - DNA, 42 bp, synthetic construct
  source 1..42: mol_type = other DNA
tgtgctactgatgcgacttctggcagctggcaactcatcttt

SEQ ID NO: 32747 - DNA, 48 bp, synthetic construct
  source 1..48: mol_type = other DNA
tgtgccagcagcttaggacgggacagaaactatgctgagcagttcttc

SEQ ID NO: 32748 - DNA, 36 bp, synthetic construct
  source 1..36: mol_type = other DNA
tgtgctatggagaacatgggctacaaacttaccttc

SEQ ID NO: 32749 - DNA, 45 bp, synthetic construct
  source 1..45: mol_type = other DNA
tgtgccagcagcttagggacagcaaacaccgggcagctctacttt

SEQ ID NO: 32750 - DNA, 48 bp, synthetic construct; identical to SEQ ID NO: 26026
  source 1..48: mol_type = other DNA

SEQ ID NO: 32751 - DNA, 42 bp, synthetic construct
  source 1..42: mol_type = other DNA
tgtgccagcagcttagggacagcaaactccgactacaccttc

SEQ ID NO: 32752 - DNA, 45 bp, synthetic construct
  source 1..45: mol_type = other DNA
tgcgcagcaggtgcggctactggaggcaataataagctgactttt

SEQ ID NO: 32753 - DNA, 51 bp, synthetic construct
  source 1..51: mol_type = other DNA
tgtgccagcagcttagggacaggggattcctataattcgcccctctacttt

SEQ ID NO: 32754 - DNA, 42 bp, synthetic construct
  source 1..42: mol_type = other DNA
tgtgctctgagcccatcttctggcagctggcaactcatcttt

SEQ ID NO: 32755 - DNA, 42 bp, synthetic construct; identical to SEQ ID NO: 31593
  source 1..42: mol_type = other DNA

SEQ ID NO: 32756 - DNA, 42 bp, synthetic construct; identical to SEQ ID NO: 31594
  source 1..42: mol_type = other DNA

SEQ ID NO: 32757 - DNA, 42 bp, synthetic construct
  source 1..42: mol_type = other DNA
tgtgccagcagctttgggacaggggcctatgaacagtacttc

SEQ ID NO: 32758 - DNA, 48 bp, synthetic construct
  source 1..48: mol_type = other DNA
tgtgcagcaagcagagggtctggaggaagcaatgcaaagctaaccttc

SEQ ID NO: 32759 - DNA, 42 bp, synthetic construct; identical to SEQ ID NO: 31781
  source 1..42: mol_type = other DNA

SEQ ID NO: 32760 - DNA, 42 bp, synthetic construct; identical to SEQ ID NO: 31482
  source 1..42: mol_type = other DNA

SEQ ID NO: 32761 - DNA, 42 bp, synthetic construct; identical to SEQ ID NO: 31781
  source 1..42: mol_type = other DNA

SEQ ID NO: 32762 - DNA, 36 bp, synthetic construct
  source 1..36: mol_type = other DNA
tgcgcagcgtaccagggaggcagagctctgatattt

SEQ ID NO: 32763 - DNA, 42 bp, synthetic construct
  source 1..42: mol_type = other DNA
tgtggtgctagacagggggttaaccaagacacccagtacttt

SEQ ID NO: 32764 - DNA, 36 bp, synthetic construct; identical to SEQ ID NO: 32092
  source 1..36: mol_type = other DNA

SEQ ID NO: 32765 - DNA, 36 bp, synthetic construct
  source 1..36: mol_type = other DNA
tgtggtgctagacggggagggacagaagtcttcttt

SEQ ID NO: 32766 - DNA, 42 bp, synthetic construct
  source 1..42: mol_type = other DNA
tgtgctttgagccctagcaacatgggctacaaacttaccttc

SEQ ID NO: 32767 - DNA, 45 bp, synthetic construct; identical to SEQ ID NO: 31693
  source 1..45: mol_type = other DNA

SEQ ID NO: 32768 - DNA, 39 bp, synthetic construct
  source 1..39: mol_type = other DNA
tgtgcagcaaggggttcagccttagggaggctgcatttt

SEQ ID NO: 32769 - DNA, 45 bp, synthetic construct
  source 1..45: mol_type = other DNA
tgtggtgctagggatcagcggacaaactatgctgagcagttcttc

SEQ ID NO: 32770 - DNA, 39 bp, synthetic construct; identical to SEQ ID NO: 31524
  source 1..39: mol_type = other DNA

SEQ ID NO: 32771 - DNA, 42 bp, synthetic construct
  source 1..42: mol_type = other DNA
tgtggtgctagggatcggggcagggggacagaagtcttcttt

SEQ ID NO: 32772 - DNA, 39 bp, synthetic construct
  source 1..39: mol_type = other DNA
tgtgcagctagtgagaactatgcccagggattaaccttc

SEQ ID NO: 32773 - DNA, 45 bp, synthetic construct
  source 1..45: mol_type = other DNA
tgtggtgctagggatcgggggtataacaaccaggctccgcttttt

SEQ ID NO: 32774 - DNA, 48 bp, synthetic construct; identical to SEQ ID NO: 32406
  source 1..48: mol_type = other DNA

SEQ ID NO: 32775 - DNA, 36 bp, synthetic construct; identical to SEQ ID NO: 31617
  source 1..36: mol_type = other DNA

SEQ ID NO: 32776 - DNA, 42 bp, synthetic construct
  source 1..42: mol_type = other DNA
tgtgctatagagcctaacaccaatacaggcaaattaaccttt

SEQ ID NO: 32777 - DNA, 48 bp, synthetic construct
  source 1..48: mol_type = other DNA
tgtggtgctagggcctcctgggacagggactcctatgaacagtacttc

SEQ ID NO: 32778 - DNA, 42 bp, synthetic construct
  source 1..42: mol_type = other DNA
tgtgcagctagtgggtcttccaataccaacaaagtcgtcttt

SEQ ID NO: 32779 - DNA, 36 bp, synthetic construct
  source 1..36: mol_type = other DNA
tgtggtgctagggggtctggaaatacgctctatttt

SEQ ID NO: 32780 - DNA, 36 bp, synthetic construct
  source 1..36: mol_type = other DNA
tgtgctactgaatcgggatacaacaaactcactttt

SEQ ID NO: 32781 - DNA, 36 bp, synthetic construct
  source 1..36: mol_type = other DNA
tgtggtgctagtgtgggggctggggaacagtacttc

SEQ ID NO: 32782 - DNA, 42 bp, synthetic construct; identical to SEQ ID NO: 31478
  source 1..42: mol_type = other DNA

SEQ ID NO: 32783 - DNA, 36 bp, synthetic construct; identical to SEQ ID NO: 32781
  source 1..36: mol_type = other DNA

SEQ ID NO: 32784 - DNA, 36 bp, synthetic construct; identical to SEQ ID NO: 32412
  source 1..36: mol_type = other DNA

SEQ ID NO: 32785 - DNA, 36 bp, synthetic construct
  source 1..36: mol_type = other DNA
tgtggtgctagggagggcaccgggcagctctacttt

SEQ ID NO: 32786 - DNA, 39 bp, synthetic construct
  source 1..39: mol_type = other DNA
tgtgcagcaagcgagaataacaataacagaatcttcttt

SEQ ID NO: 32787 - DNA, 42 bp, synthetic construct
  source 1..42: mol_type = other DNA
tgtgccacccgggactggggggactcctatgaacagtacttc

SEQ ID NO: 32788 - DNA, 39 bp, synthetic construct
  source 1..39: mol_type = other DNA
tgtgctttgaagggctatggaaatgagaaaataactttt

SEQ ID NO: 32789 - DNA, 42 bp, synthetic construct
  source 1..42: mol_type = other DNA
tgtgccagcaccccggggggggctggaaatacgctctatttt

SEQ ID NO: 32790 - DNA, 42 bp, synthetic construct
  source 1..42: mol_type = other DNA
tgtgcagtgaagactggagctaacactggaaagctcacgttt

SEQ ID NO: 32791 - DNA, 42 bp, synthetic construct
  source 1..42: mol_type = other DNA
tgtgccagcacctcggggggatccaacgaaagattatttttc

SEQ ID NO: 32792 - DNA, 39 bp, synthetic construct
  source 1..39: mol_type = other DNA
tgtgttctgggtcgggatagcaactatcagttgatctgg

SEQ ID NO: 32793 - DNA, 36 bp, synthetic construct
  source 1..36: mol_type = other DNA
tgtgccagcagacaggggagggacacccagtacttt

SEQ ID NO: 32794 - DNA, 45 bp, synthetic construct
  source 1..45: mol_type = other DNA
tgcattgtgactgacatggaaggaggaaactacaaacctacgttt

SEQ ID NO: 32795 - DNA, 42 bp, synthetic construct
  source 1..42: mol_type = other DNA
tgtgccagcagacgactggggggtgcagaaacgctgtatttt

SEQ ID NO: 32796 - DNA, 48 bp, synthetic construct
  source 1..48: mol_type = other DNA
tgtgctatgagagaggacactggagctaacactggaaagctcacgttt

SEQ ID NO: 32797 - DNA, 42 bp, synthetic construct
  source 1..42: mol_type = other DNA
tgtgccagcagccaatctgggggccaagacacccagtacttt

SEQ ID NO: 32798 - DNA, 36 bp, synthetic construct
  source 1..36: mol_type = other DNA
tgtgctcttgggtctaattacaacgtgctttacttc

SEQ ID NO: 32799 - DNA, 36 bp, synthetic construct
  source 1..36: mol_type = other DNA
tgtgccagcagccccggacaatatgaacagtacttc

SEQ ID NO: 32800 - DNA, 42 bp, synthetic construct
  source 1..42: mol_type = other DNA
tgtgctgtgagcgataacaccaatacaggcaaattaaccttt

SEQ ID NO: 32801 - DNA, 42 bp, synthetic construct
  source 1..42: mol_type = other DNA
tgtgccagcagccccgggacagcaaacacagaagtcttcttt

SEQ ID NO: 32802 - DNA, 42 bp, synthetic construct
  source 1..42: mol_type = other DNA
tgtgctatgagagagccttccaataccaacaaagtcgtcttt

SEQ ID NO: 32803 - DNA, 36 bp, synthetic construct
  source 1..36: mol_type = other DNA
tgtgccagcagcccgaggctagacacccagtacttt

SEQ ID NO: 32804 - DNA, 45 bp, synthetic construct
  source 1..45: mol_type = other DNA
tgtgctctgagtttggctactggaggcaataataagctgactttt

SEQ ID NO: 32805 - DNA, 42 bp, synthetic construct
  source 1..42: mol_type = other DNA
tgtgccagcagcgccgggactgggcaagacacccagtacttt

SEQ ID NO: 32806 - DNA, 45 bp, synthetic construct
  source 1..45: mol_type = other DNA
tgtgctctgagtgatcgggggacaaatgcttacaaagtcatcttt

SEQ ID NO: 32807 - DNA, 48 bp, synthetic construct
  source 1..48: mol_type = other DNA
tgtgccagcaggaggggactgggggggaactatgctgagcagttcttc

SEQ ID NO: 32808 - DNA, 42 bp, synthetic construct
  source 1..42: mol_type = other DNA
tgcgcagtcagtgcccccaccaatacaggcaaattaaccttt

SEQ ID NO: 32809 - DNA, 33 bp, synthetic construct
  source 1..33: mol_type = other DNA
tgtgccagcagggacagctatgaacagtacttc

SEQ ID NO: 32810 - DNA, 39 bp, synthetic construct
  source 1..39: mol_type = other DNA
tgtgctctgagggggaataacaataacagaatcttcttt

SEQ ID NO: 32811 - DNA, 33 bp, synthetic construct
  source 1..33: mol_type = other DNA
tgtgccagcagggggaacacagaagtcttcttt

SEQ ID NO: 32812 - DNA, 36 bp, synthetic construct
  source 1..36: mol_type = other DNA
tgcgcagtcggtacaggaaactacaaatacgtcttt

SEQ ID NO: 32813 - DNA, 33 bp, synthetic construct
  source 1..33: mol_type = other DNA
tgtgccagcaggggggaagacacccagtacttt

SEQ ID NO: 32814 - DNA, 45 bp, synthetic construct
  source 1..45: mol_type = other DNA
tgtgctctgagtgatccccgccagggaggcagagctctgatattt

SEQ ID NO: 32815 - DNA, 45 bp, synthetic construct
  source 1..45: mol_type = other DNA
tgtgccagcagtaaatacaggaggagctcctatgaacagtacttc

SEQ ID NO: 32816 - DNA, 42 bp, synthetic construct
  source 1..42: mol_type = other DNA
tgtgctatggaggcatcctcctccttcagcaagctggtgttt

SEQ ID NO: 32817 - DNA, 39 bp, synthetic construct
  source 1..39: mol_type = other DNA
tgtgccagcagtacaggggaggactccgactacaccttc

SEQ ID NO: 32818 - DNA, 42 bp, synthetic construct
  source 1..42: mol_type = other DNA
tgtgcagcaagtgggggtggaggcaataataagctgactttt

SEQ ID NO: 32819 - DNA, 45 bp, synthetic construct
  source 1..45: mol_type = other DNA
tgtgccagcagtacggacagggacggccaagacacccagtacttt

SEQ ID NO: 32820 - DNA, 36 bp, synthetic construct
  source 1..36: mol_type = other DNA
tgcgcagtatcttctggcagctggcaactcatcttt

SEQ ID NO: 32821 - DNA, 36 bp, synthetic construct
  source 1..36: mol_type = other DNA
tgtgccagcagtacggggacagacacccagtacttt

SEQ ID NO: 32822 - DNA, 48 bp, synthetic construct
  source 1..48: mol_type = other DNA
tgtgcagtgagcaactcttatgggagcagtggcaacaagctcatcttt

SEQ ID NO: 32823 - DNA, 42 bp, synthetic construct
  source 1..42: mol_type = other DNA
tgtgccagcagtataaccgagaaccaagacacccagtacttt

SEQ ID NO: 32824 - DNA, 39 bp, synthetic construct; identical to SEQ ID NO: 31500
  source 1..39: mol_type = other DNA

SEQ ID NO: 32825 - DNA, 45 bp, synthetic construct
  source 1..45: mol_type = other DNA
tgtgccagcagtataactgggggtagtgcagaaacgctgtatttt

SEQ ID NO: 32826 - DNA, 42 bp, synthetic construct
  source 1..42: mol_type = other DNA
tgtgctacagatgcaaactacagcaacaacagacttactttg

SEQ ID NO: 32827 - DNA, 39 bp, synthetic construct
  source 1..39: mol_type = other DNA
tgtgccagcagtatacacagggctgctgagcagttcttc

SEQ ID NO: 32828 - DNA, 48 bp, synthetic construct
  source 1..48: mol_type = other DNA
tgtatcctgagagtagctcctactggaggcaataataagctgactttt

SEQ ID NO: 32829 - DNA, 39 bp, synthetic construct
  source 1..39: mol_type = other DNA
tgtgccagcagtatagactgggggtatgaacagtacttc

SEQ ID NO: 32830 - DNA, 45 bp, synthetic construct
  source 1..45: mol_type = other DNA
tgtgctgcgagcatgaggggggactatgcaaacaagatgatcttt

SEQ ID NO: 32831 - DNA, 42 bp, synthetic construct
  source 1..42: mol_type = other DNA
tgtgccagcagtatagctacaggcaacgaaagattatttttc

SEQ ID NO: 32832 - DNA, 36 bp, synthetic construct
  source 1..36: mol_type = other DNA
tgtgcttgtttctatggaaatgagaaaataactttt

SEQ ID NO: 32833 - DNA, 36 bp, synthetic construct
  source 1..36: mol_type = other DNA
tgtgccagcagtatagctggatcgcccctctacttt

SEQ ID NO: 32834 - DNA, 36 bp, synthetic construct
  source 1..36: mol_type = other DNA
tgtgctactgatgctggttaccagaacttctatttt

SEQ ID NO: 32835 - DNA, 39 bp, synthetic construct
  source 1..39: mol_type = other DNA
tgtgccagcagtataggaagggtttcgcccctctacttt

SEQ ID NO: 32836 - DNA, 48 bp, synthetic construct
  source 1..48: mol_type = other DNA
tgtgctatagatggagaggcatcctcctccttcagcaagctggtgttt

SEQ ID NO: 32837 - DNA, 48 bp, synthetic construct
  source 1..48: mol_type = other DNA
tgtgccagcagtataggaggacagggggcaaacgaaagattatttttc

SEQ ID NO: 32838 - DNA, 36 bp, synthetic construct
  source 1..36: mol_type = other DNA
tgtgctttgaataatgcaggtgccaagctcacattc

SEQ ID NO: 32839 - DNA, 45 bp, synthetic construct
  source 1..45: mol_type = other DNA
tgtgccagcagtataggggggactagtgcagaaacgctgtatttt

SEQ ID NO: 32840 - DNA, 42 bp, synthetic construct; identical to SEQ ID NO: 32670
  source 1..42: mol_type = other DNA

SEQ ID NO: 32841 - DNA, 36 bp, synthetic construct
  source 1..36: mol_type = other DNA
tgtgccagcagtataggtgggtgggaacagtacttc

SEQ ID NO: 32842 - DNA, 42 bp, synthetic construct
  source 1..42: mol_type = other DNA
tgtgctgtgagccttactggaggcaataataagctgactttt

SEQ ID NO: 32843 - DNA, 36 bp, synthetic construct
  source 1..36: mol_type = other DNA
tgtgccagcagtatatccaacgaaagattatttttc

SEQ ID NO: 32844 - DNA, 36 bp, synthetic construct
  source 1..36: mol_type = other DNA
tgtgctatagaccccaatacaggcaaattaaccttt

SEQ ID NO: 32845 - DNA, 42 bp, synthetic construct
  source 1..42: mol_type = other DNA
tgtgccagcagtatcaaagggacaaactccgactacaccttc

SEQ ID NO: 32846 - DNA, 39 bp, synthetic construct
  source 1..39: mol_type = other DNA
tgtgcagctagtgtctctggcagctggcaactcatcttt

SEQ ID NO: 32847 - DNA, 36 bp, synthetic construct
  source 1..36: mol_type = other DNA
tgtgccagcagtatccgatacacagaagtcttcttt

SEQ ID NO: 32848 - DNA, 42 bp, synthetic construct
  source 1..42: mol_type = other DNA
tgtgctatggactccaactatggaaatgagaaaataactttt

SEQ ID NO: 32849 - DNA, 45 bp, synthetic construct
  source 1..45: mol_type = other DNA
tgtgccagcagtatcggggggacgagtgcagaaacgctgtatttt

SEQ ID NO: 32850 - DNA, 54 bp, synthetic construct
  source 1..54: mol_type = other DNA
tgtgctatgagagagggccaagtcactggagctaacactggaaagctcacgttt

SEQ ID NO: 32851 - DNA, 36 bp, synthetic construct
  source 1..36: mol_type = other DNA
tgtgccagcagtatcggtgggagtgaacagtacttc

SEQ ID NO: 32852 - DNA, 45 bp, synthetic construct
  source 1..45: mol_type = other DNA
tgtgctgctgacgacagtggaggcagcaattacaaactgacattt

SEQ ID NO: 32853 - DNA, 36 bp, synthetic construct
  source 1..36: mol_type = other DNA
tgtgccagcagtatcttcaacgaaagattatttttc

SEQ ID NO: 32854 - DNA, 48 bp, synthetic construct
  source 1..48: mol_type = other DNA
tgcgcagtcagggcatacactggagctaacactggaaagctcacgttt

SEQ ID NO: 32855 - DNA, 36 bp, synthetic construct
  source 1..36: mol_type = other DNA
tgtgccagcagtatgaaggaagacacccagtacttt

SEQ ID NO: 32856 - DNA, 45 bp, synthetic construct
  source 1..45: mol_type = other DNA
tgtgcagtgagcatcggtacaggaggtgcagatagactcaccttt

SEQ ID NO: 32857 - DNA, 39 bp, synthetic construct; identical to SEQ ID NO: 31267
  source 1..39: mol_type = other DNA

SEQ ID NO: 32858 - DNA, 39 bp, synthetic construct
  source 1..39: mol_type = other DNA
tgcgctctgagtgataactatgcccagggattaaccttc

SEQ ID NO: 32859 - DNA, 36 bp, synthetic construct
  source 1..36: mol_type = other DNA
tgtgccagcagtatggggaattcgcccctctacttt

SEQ ID NO: 32860 - DNA, 51 bp, synthetic construct
  source 1..51: mol_type = other DNA
tgtgctatgagagagggcgagaatgggagcagtggcaacaagctcatcttt

SEQ ID NO: 32861 - DNA, 36 bp, synthetic construct
  source 1..36: mol_type = other DNA
tgtgccagcagtatgggggacgaaagattatttttc

SEQ ID NO: 32862 - DNA, 39 bp, synthetic construct
  source 1..39: mol_type = other DNA
tgtgctatgagagagagctatgcccagggattaaccttc

SEQ ID NO: 32863 - DNA, 45 bp, synthetic construct
  source 1..45: mol_type = other DNA
tgtgccagcagtatgggggggctgggcaccgggcagctctacttt

SEQ ID NO: 32864 - DNA, 36 bp, synthetic construct; identical to SEQ ID NO: 31780
  source 1..36: mol_type = other DNA

SEQ ID NO: 32865 - DNA, 42 bp, synthetic construct
  source 1..42: mol_type = other DNA
tgtgccagcagtattgggacagacaacgaaagattatttttc

SEQ ID NO: 32866 - DNA, 42 bp, synthetic construct
  source 1..42: mol_type = other DNA
tgtgctctgaccgcatcttctggcagctggcaactcatcttt

SEQ ID NO: 32867 - DNA, 33 bp, synthetic construct
  source 1..33: mol_type = other DNA
tgtgccagcagtattggggatgaacagtacttc

SEQ ID NO: 32868 - DNA, 42 bp, synthetic construct
  source 1..42: mol_type = other DNA
tgtgctctcccctcgaacacgggttaccagaacttctatttt

SEQ ID NO: 32869 - DNA, 45 bp, synthetic construct
  source 1..45: mol_type = other DNA
tgtgccagcagtcaggagggttctagtgcagaaacgctgtatttt

SEQ ID NO: 32870 - DNA, 39 bp, synthetic construct
  source 1..39: mol_type = other DNA
tgtgcagcaacctcaggaggaaactacaaacctacgttt

SEQ ID NO: 32871 - DNA, 39 bp, synthetic construct
  source 1..39: mol_type = other DNA
tgtgccagcagtcagggggcggactccgactacaccttc

SEQ ID NO: 32872 - DNA, 42 bp, synthetic construct
  source 1..42: mol_type = other DNA
tgcgcagtcagtgcggcttctggcagctggcaactcatcttt

SEQ ID NO: 32873 - DNA, 39 bp, synthetic construct
  source 1..39: mol_type = other DNA
tgtgccagcagtccccgggacaactatgaacagtacttc

SEQ ID NO: 32874 - DNA, 42 bp, synthetic construct
  source 1..42: mol_type = other DNA
tgtgctctgagaagtaattataaccaggggaagcttatcttt

SEQ ID NO: 32875 - DNA, 42 bp, synthetic construct
  source 1..42: mol_type = other DNA
tgtgccagcagtccggggaaaaacaccgggcagctctacttt

SEQ ID NO: 32876 - DNA, 45 bp, synthetic construct
  source 1..45: mol_type = other DNA
tgtgctatgaggggggatgactcgggatacaacaaactcactttt

SEQ ID NO: 32877 - DNA, 42 bp, synthetic construct
  source 1..42: mol_type = other DNA
tgtgccagcagtcgacagggttctggaaatacgctctatttt

SEQ ID NO: 32878 - DNA, 42 bp, synthetic construct
  source 1..42: mol_type = other DNA
tgtgcagctagtgagctctacagcaacaacagacttactttg

SEQ ID NO: 32879 - DNA, 36 bp, synthetic construct
  source 1..36: mol_type = other DNA
tgtgccagcagtctacagggtccagaagtcttcttt

SEQ ID NO: 32880 - DNA, 45 bp, synthetic construct
  source 1..45: mol_type = other DNA
tgtgctctgagtgatttagggtctggcagctggcaactcatcttt

SEQ ID NO: 32881 - DNA, 42 bp, synthetic construct
  source 1..42: mol_type = other DNA
tgtgccagcagttcaccgggacaatatgctgagcagttcttc

SEQ ID NO: 32882 - DNA, 42 bp, synthetic construct
  source 1..42: mol_type = other DNA
tgtgcagcaacctatacaggaggtgcagatagactcaccttt

SEQ ID NO: 32883 - DNA, 45 bp, synthetic construct
  source 1..45: mol_type = other DNA
tgtgccagcagtttcccgggacaggggtatgctgagcagttcttc

SEQ ID NO: 32884 - DNA, 33 bp, synthetic construct
  source 1..33: mol_type = other DNA
tgtgcccgcacaaatgcttacaaagtcatcttt

SEQ ID NO: 32885 - DNA, 42 bp, synthetic construct
  source 1..42: mol_type = other DNA
tgtgccagcgcacagggtttctataattcgcccctctacttt

SEQ ID NO: 32886 - DNA, 42 bp, synthetic construct
  source 1..42: mol_type = other DNA
tgtgctgctcctaatacagaaggtgcagatagactcaccttt

SEQ ID NO: 32887 - DNA, 45 bp, synthetic construct
  source 1..45: mol_type = other DNA
tgtgccagcgctccgggacagggttacaacgaaagattatttttc

SEQ ID NO: 32888 - DNA, 45 bp, synthetic construct
  source 1..45: mol_type = other DNA
tgcattgtgactgcctatgttggtgacaacagtaagctgatttgg

SEQ ID NO: 32889 - DNA, 36 bp, synthetic construct
  source 1..36: mol_type = other DNA
tgtgccagcgggactggggatgctgagcagttcttc

SEQ ID NO: 32890 - DNA, 36 bp, synthetic construct
  source 1..36: mol_type = other DNA
tgcgcagtcatcgggggaggcagagctctgatattt

SEQ ID NO: 32891 - DNA, 36 bp, synthetic construct
  source 1..36: mol_type = other DNA
tgtgccagctccccgggtcaaaacaccttgtacttt

SEQ ID NO: 32892 - DNA, 45 bp, synthetic construct
  source 1..45: mol_type = other DNA
tgtgctctgagtgaccttacaggaggtgcagatagactcaccttt

SEQ ID NO: 32893 - DNA, 39 bp, synthetic construct
  source 1..39: mol_type = other DNA
tgcacctgcaggacagggggccggacagaagtcttcttt

SEQ ID NO: 32894 - DNA, 45 bp, synthetic construct
  source 1..45: mol_type = other DNA
tgtgctgtgagcaacttccaaggcactgggtctaagctgtcattt

SEQ ID NO: 32895 - DNA, 36 bp, synthetic construct
  source 1..36: mol_type = other DNA
tgcacctgcagtccagggggcacagaagtcttcttt

SEQ ID NO: 32896 - DNA, 39 bp, synthetic construct; identical to SEQ ID NO: 31506
  source 1..39: mol_type = other DNA

SEQ ID NO: 32897 - DNA, 36 bp, synthetic construct; identical to SEQ ID NO: 32895
  source 1..36: mol_type = other DNA

SEQ ID NO: 32898 - DNA, 39 bp, synthetic construct; identical to SEQ ID NO: 31834
  source 1..39: mol_type = other DNA

SEQ ID NO: 32899 - DNA, 42 bp, synthetic construct
  source 1..42: mol_type = other DNA
tgcacctgcagtgacaattcctataattcgcccctctacttt

SEQ ID NO: 32900 - DNA, 42 bp, synthetic construct; identical to SEQ ID NO: 26514
  source 1..42: mol_type = other DNA

SEQ ID NO: 32901 - DNA, 42 bp, synthetic construct
  source 1..42: mol_type = other DNA
tgcacctgcagtgcaagcagggcaaactccgactacaccttc

SEQ ID NO: 32902 - DNA, 51 bp, synthetic construct
  source 1..51: mol_type = other DNA
tgtgctttgagtgatcatggttctggaggaagcaatgcaaagctaaccttc

SEQ ID NO: 32903 - DNA, 33 bp, synthetic construct; identical to SEQ ID NO: 31663
  source 1..33: mol_type = other DNA

SEQ ID NO: 32904 - DNA, 42 bp, synthetic construct
  source 1..42: mol_type = other DNA
tgtgcggtgagccccctcaccaagacaggcaaattacccttt

SEQ ID NO: 32905 - DNA, 51 bp, synthetic construct
  source 1..51: mol_type = other DNA
tgcacctgcagtgcagaaagcatggggtcttctggaaatacgctctatttt

SEQ ID NO: 32906 - DNA, 48 bp, synthetic construct
  source 1..48: mol_type = other DNA
tgtgctgtgagggatctaccaggcactgggagtaacaggctcactttt

SEQ ID NO: 32907 - DNA, 48 bp, synthetic construct
  source 1..48: mol_type = other DNA
tgcacctgcagtgcagaagcgggggttaactatgctgagcagttcttc

SEQ ID NO: 32908 - DNA, 45 bp, synthetic construct
  source 1..45: mol_type = other DNA
tgtgtggtgggcgatagaggttcagccttagggaggctgcatttt

SEQ ID NO: 32909 - DNA, 42 bp, synthetic construct
  source 1..42: mol_type = other DNA
tgcacctgcagtgcagactggggggtctatgaacagtacttc

SEQ ID NO: 32910 - DNA, 36 bp, synthetic construct
  source 1..36: mol_type = other DNA
tgtgctttaacagaaggtgcagatagactcaccttt

SEQ ID NO: 32911 - DNA, 45 bp, synthetic construct
  source 1..45: mol_type = other DNA
tgcacctgcagtgcagatacggggagtcaaaacaccttgtacttt

SEQ ID NO: 32912 - DNA, 36 bp, synthetic construct
  source 1..36: mol_type = other DNA
tgtgcttctaacacgggttaccagaacttctatttt

SEQ ID NO: 32913 - DNA, 42 bp, synthetic construct
  source 1..42: mol_type = other DNA
tgcacctgcagtgcagatccagggcaagacacccagtacttt

SEQ ID NO: 32914 - DNA, 45 bp, synthetic construct
  source 1..45: mol_type = other DNA
tgtgcagcaagtgcgtgggggggcagtggcaacaagctcatcttt

SEQ ID NO: 32915 - DNA, 45 bp, synthetic construct
  source 1..45: mol_type = other DNA
tgcacctgcagtgcagatcccttttccaacgaaagattatttttc

SEQ ID NO: 32916 - DNA, 39 bp, synthetic construct
  source 1..39: mol_type = other DNA
tgtgctgcaagtggagatggaaatgagaaaataactttt

SEQ ID NO: 32917 - DNA, 42 bp, synthetic construct
  source 1..42: mol_type = other DNA
tgcacctgcagtgcagatcgccaggggacagaagtcttcttt

SEQ ID NO: 32918 - DNA, 48 bp, synthetic construct
  source 1..48: mol_type = other DNA
tgtgttttgagcgcgagggctggaggaagcaatgcaaagctaaccttc

SEQ ID NO: 32919 - DNA, 36 bp, synthetic construct
  source 1..36: mol_type = other DNA
tgcacctgcagtgcagcaggggatgaacagtacttc

SEQ ID NO: 32920 - DNA, 36 bp, synthetic construct
  source 1..36: mol_type = other DNA
tgtgctttggaaccaaatgcttacaaagtcatcttt

SEQ ID NO: 32921 - DNA, 42 bp, synthetic construct
  source 1..42: mol_type = other DNA
tgcacctgcagtgcaggacagaacaccgggcagctctacttt

SEQ ID NO: 32922 - DNA, 39 bp, synthetic construct
  source 1..39: mol_type = other DNA
tgcgcagtcagtgcagatagcaataacagaatcttcttt

SEQ ID NO: 32923 - DNA, 45 bp, synthetic construct
  source 1..45: mol_type = other DNA
tgcacctgcagtgcaggccaggggaactatgctgagcagttcttc

SEQ ID NO: 32924 - DNA, 42 bp, synthetic construct
  source 1..42: mol_type = other DNA
tgtgctatgagaccaacaggcaatactagaaaactcatcttt

SEQ ID NO: 32925 - DNA, 45 bp, synthetic construct
  source 1..45: mol_type = other DNA
tgcacctgcagtgcaggcggcaatagtgcagaaacgctgtatttt

SEQ ID NO: 32926 - DNA, 33 bp, synthetic construct
  source 1..33: mol_type = other DNA
tgtgctacaggtgacaacagtaagctgatttgg

SEQ ID NO: 32927 - DNA, 39 bp, synthetic construct
  source 1..39: mol_type = other DNA
tgcacctgcagtgcagggacaacagaaacgctgtatttt

SEQ ID NO: 32928 - DNA, 45 bp, synthetic construct
  source 1..45: mol_type = other DNA
tgtgttttgagggagtatcaaggagggtctgcgaagctcatcttt

SEQ ID NO: 32929 - DNA, 39 bp, synthetic construct
  source 1..39: mol_type = other DNA
tgcacctgcagtgcagggacagacacagaagtcttcttt

SEQ ID NO: 32930 - DNA, 45 bp, synthetic construct
  source 1..45: mol_type = other DNA
tgtgcagctagtgagcacgggactggaggctataaagtggtcttt

SEQ ID NO: 32931 - DNA, 45 bp, synthetic construct
  source 1..45: mol_type = other DNA
tgcacctgcagtgcagggagttcctataattcgcccctctacttt

SEQ ID NO: 32932 - DNA, 45 bp, synthetic construct
  source 1..45: mol_type = other DNA
tgtgctattcctaacagtggaggcagcaattacaaactgacattt

SEQ ID NO: 32933 - DNA, 39 bp, synthetic construct
  source 1..39: mol_type = other DNA
tgcacctgcagtgcaggggataattcgcccctctacttt

SEQ ID NO: 32934 - DNA, 42 bp, synthetic construct
  source 1..42: mol_type = other DNA
tgtgctctgggtgaggacacgggttaccagaacttctatttt

SEQ ID NO: 32935 - DNA, 45 bp, synthetic construct
  source 1..45: mol_type = other DNA
tgcacctgcagtgcaggggggggaggtgcagaaacgctgtatttt

SEQ ID NO: 32936 - DNA, 36 bp, synthetic construct
  source 1..36: mol_type = other DNA
tgcgctttgaacagtgcagggaacaagctaactttt

SEQ ID NO: 32937 - DNA, 45 bp, synthetic construct
  source 1..45: mol_type = other DNA
tgcacctgcagtgcaggggggggtgagaattcgcccctctacttt

SEQ ID NO: 32938 - DNA, 45 bp, synthetic construct
  source 1..45: mol_type = other DNA
tgtgtggtggcgccttatgggagcagtggcaacaagctcatcttt

SEQ ID NO: 32939 - DNA, 45 bp, synthetic construct; identical to SEQ ID NO: 32937
  source 1..45: mol_type = other DNA

SEQ ID NO: 32940 - DNA, 36 bp, synthetic construct
  source 1..36: mol_type = other DNA
tgcgcagtcagtagtgcagggaacaagctaactttt

SEQ ID NO: 32941 - DNA, 39 bp, synthetic construct
  source 1..39: mol_type = other DNA
tgcacctgcagtgccgggacagacacagaagtcttcttt

SEQ ID NO: 32942 - DNA, 45 bp, synthetic construct
  source 1..45: mol_type = other DNA
tgtgcagctagtgagcatgggactggaggctataaagtggtcttt

SEQ ID NO: 32943 - DNA, 48 bp, synthetic construct
  source 1..48: mol_type = other DNA
tgcacctgcagtgccgggactgggggggcgatgtatgaacagtacttc

SEQ ID NO: 32944 - DNA, 33 bp, synthetic construct
  source 1..33: mol_type = other DNA
tgtgctggagaaggtgcagatagactcaccttt

SEQ ID NO: 32945 - DNA, 45 bp, synthetic construct
  source 1..45: mol_type = other DNA
tgcacctgcagtgcgacagcttcctataattcgcccctctacttt

SEQ ID NO: 32946 - DNA, 51 bp, synthetic construct
  source 1..51: mol_type = other DNA
tgtgctctgggtggagtgggggctactggaggcaataataagctgactttt

SEQ ID NO: 32947 - DNA, 45 bp, synthetic construct
  source 1..45: mol_type = other DNA
tgcacctgcagtgcgactggggctagtgcagaaacgctgtatttt

SEQ ID NO: 32948 - DNA, 36 bp, synthetic construct
  source 1..36: mol_type = other DNA
tgtgctctggggtatggaaatgagaaaataactttt

SEQ ID NO: 32949 - DNA, 39 bp, synthetic construct
  source 1..39: mol_type = other DNA
tgcacctgcagtgtcccgggacagggagaagtcttcttt

SEQ ID NO: 32950 - DNA, 36 bp, synthetic construct
  source 1..36: mol_type = other DNA
tgtgcagtgagcacaaatgcttacaaagtcatcttt

SEQ ID NO: 32951 - DNA, 45 bp, synthetic construct
  source 1..45: mol_type = other DNA
tgcacctgcagtgtccgggacaatgcaaacacagaagtcttcttt

SEQ ID NO: 32952 - DNA, 36 bp, synthetic construct
  source 1..36: mol_type = other DNA
tgtgttttgagcgctagcaataacagaatcttcttt

SEQ ID NO: 32953 - DNA, 45 bp, synthetic construct
  source 1..45: mol_type = other DNA
tgcacctgcagtgtgggactggttagtgcagaaacgctgtatttt

SEQ ID NO: 32954 - DNA, 36 bp, synthetic construct
  source 1..36: mol_type = other DNA
tgtgcagcaagttacgtgggctacaaacttaccttc

SEQ ID NO: 32955 - DNA, 42 bp, synthetic construct
  source 1..42: mol_type = other DNA
tgcacctgcagttcccggacagggctcggtgagcagttcttc

SEQ ID NO: 32956 - DNA, 42 bp, synthetic construct
  source 1..42: mol_type = other DNA
tgtgctttgagtgatgggggcagtggcaacaagctcatcttt

SEQ ID NO: 32957 - protein, 10 aa, synthetic construct
RPRPSQPSSL

SEQ ID NO: 32958 - protein, 9 aa, synthetic construct
IVRCIGVSL

SEQ ID NO: 32959 - protein, 9 aa, synthetic construct
VPRKNITLI

SEQ ID NO: 32960 - protein, 9 aa, synthetic construct
TAAEVSVRV

SEQ ID NO: 32961 - protein, 9 aa, synthetic construct
AMLDLLHVA

SEQ ID NO: 32962 - protein, 30 aa, synthetic construct
GGDLKSFLRETRPRPSQPSSLAMLDLLHVA

SEQ ID NO: 32963 - protein, 14 aa, synthetic construct
FNHQNIVRCIGVSL

SEQ ID NO: 32964 - protein, 23 aa, synthetic construct
GGDLKSFLRETRPRPSQPSSLAM

SEQ ID NO: 32965 - protein, 1626 aa, Homo sapiens
TASSGGMGAIGLLWLLPLLLSTAAVGSGMGTGQRAGSPAAGPPLQPREPLSYSRLQRKSLAVDFVVPSLFRVYARDLLLPPSSSELKAGRPEARGSLALDCAPLLRLLGPAPGVSWTAGSPAPAEARTLSRVLKGGSVRKLRRAKQLVLELGEEAILEGCVGPPGEAAVGLLQFNLSELFSWWIRQGEGRLRIRLMPEKKASEVGREGRLSAAIRASQPRLLFQIFGTGHSSLESPTNMPSPSPDYFTWNLTWIMKDSFPFLSHRSRYGLECSFDFPCELEYSPPLHDLRNQSWSWRRIPSEEASQMDLLDGPGAERSKEMPRGSFLLLNTSADSKHTILSPWMRSSSEHCTLAVSVHRHLQPSGRYIAQLLPHNEAAREILLMPTPGKHGWTVLQGRIGRPDNPFRVALEYISSGNRSLSAVDFFALKNCSEGTSPGSKMALQSSFTCWNGTVLQLGQACDFHQDCAQGEDESQMCRKLPVGFYCNFEDGFCGWTQGTLSPHTPQWQVRTLKDARFQDHQDHALLLSTTDVPASESATVTSATFPAPIKSSPCELRMSWLIRGVLRGNVSLVLVENKTGKEQGRMVWHVAAYEGLSLWQWMVLPLLDVSDRFWLQMVAWWGQGSRAIVAFDNISISLDCYLTISGEDKILQNTAPKSRNLFERNPNKELKPGENSPRQTPIFDPTVHWLFTTCGASGPHGPTQAQCNNAYQNSNLSVEVGSEGPLKGIQIWKVPATDTYSISGYGAAGGKGGKNTMMRSHGVSVLGIFNLEKDDMLYILVGQQGEDACPSTNQLIQKVCIGENNVIEEEIRVNRSVHEWAGGGGGGGGATYVFKMKDGVPVPLIIAAGGGGRAYGAKTDTFHPERLENNSSVLGLNGNSGAAGGGGGWNDNTSLLWAGKSLQEGATGGHSCPQAMKKWGWETRGGFGGGGGGCSSGGGGGGYIGGNAASNNDPEMDGEDGVSFISPLGILYTPALKVMEGHGEVNIKHYLNCSHCEVDECHMDPESHKVICFCDHGTVLAEDGVSCIVSPTPEPHLPLSLILSVVTSALVAALVLAFSGIMIVYRRKHQELQAMQMELQSPEYKLSKLRTSTIMTDYNPNYCFAGKTSSISDLKEVPRKNITLIRGLGHGAFGEVYEGQVSGMPNDPSPLQVAVKTLPEVCSEQDELDFLMEALIISKFNHQNIVRCIGVSLQSLPRFILLELMAGGDLKSFLRETRPRPSQPSSLAMLDLLHVARDIACGCQYLEENHFIHRDIAARNCLLTCPGPGRVAKIGDFGMARDIYRASYYRKGGCAMLPVKWMPPEAFMEGIFTSKTDTWSFGVLLWEIFSLGYMPYPSKSNQEVLEFVTSGGRMDPPKNCPGPVYRIMTQCWQHQPEDRPNFAIILERIEYCTQDPDVINTALPIEYGPLVEEEEKVPVRPKDPEGVPPLLVSQQAKREEERSPAAPPPLPTTSSGKAAKKPTAAEVSVRVPRGPAVEGGHVNMAFSQSNPPSELHRVHGSRNKPTSLWNPTYGSWFTEKPTKKNNPIAKKEPHERGNLGLEGSCTVPPNVATGRLPGASLLLEPSSLTANMKEVPLFRLRHFPCGNVNYGYQQQGLPLEAATAPGAGHYEDTILKSKNSMNQPGP

SEQ ID NO: 32966 - protein, 1620 aa, Homo sapiens [sequence omitted]

SEQ ID NO: 32967 - protein, 1620 aa, Homo sapiens [sequence omitted]

SEQ ID NO: 32968 - protein, 1620 aa, Homo sapiens
MGAIGLLWLLPLLLSTAAVGSGMGTGQRAGSPAAGPPLQPREPLSYSRLQRKSLAVDFVVPSLFRVYARDLLLPPSSSELKAGRPEARGSLALDCAPLLRLLGPAPGVSWTAGSPAPAEARTLSRVLKGGSVRKLRRAKQLVLELGEEAILEGCVGPPGEAAVGLLQFNLSELFSWWIRQGEGRLRIRLMPEKKASEVGREGRLSAAIRASQPRLLFQIFGTGHSSLESPTNMPSPSPDYFTWNLTWIMKDSFPFLSHRSRYGLECSFDFPCELEYSPPLHDLRNQSWSWRRIPSEEASQMDLLDGPGAERSKEMPRGSFLLLNTSADSKHTILSPWMRSSSEHCTLAVSVHRHLQPSGRYIAQLLPHNEAAREILLMPTPGKHGWTVLQGRIGRPDNPFRVALEYISSGNRSLSAVDFFALKNCSEGTSPGSKMALQSSFTCWNGTVLQLGQACDFHQDCAQGEDESQMCRKLPVGFYCNFEDGFCGWTQGTLSPHTPQWQVRTLKDARFQDHQDHALLLSTTDVPASESATVTSATFPAPIKSSPCELRMSWLIRGVLRGNVSLVLVENKTGKEQGRMVWHVAAYEGLSLWQWMVLPLLDVSDRFWLQMVAWWGQGSRAIVAFDNISISLDCYLTISGEDKILQNTAPKSRNLFERNPNKELKPGENSPRQTPIFDPTVHWLFTTCGASGPHGPTQAQCNNAYQNSNLSVEVGSEGPLKGIQIWKVPATDTYSISGYGAAGGKGGKNTMMRSHGVSVLGIFNLEKDDMLYILVGQQGEDACPSTNQLIQKVCIGENNVIEEEIRVNRSVHEWAGGGGGGGGATYVFKMKDGVPVPLIIAAGGGGRAYGAKTDTFHPERLENNSSVLGLNGNSGAAGGGGGWNDNTSLLWAGKSLQEGATGGHSCPQAMKKWGWETRGGFGGGGGGCSSGGGGGGYIGGNAASNNDPEMDGEDGVSFISPLGILYTPALKVMEGHGEVNIKHYLNCSHCEVDECHMDPESHKVICFCDHGTVLAEDGVSCIVSPTPEPHLPLSLILSVVTSALVAALVLAFSGIMIVYRRKHQELQAMQMELQSPEYKLSKLRTSTIMTDYNPNYCFAGKTSSISDLKEVPRKNITLIRGLGHGAFGEVYEGQVSGMPNDPSPLQVAVKTLPEVCSEQDELDFLMEALIISKFNHQNIVRCIGVSLQSLPRFILLELMAGGDLKSFLRETRPRPSQPSSLAMLDLLHVARDIACGCQYLEENHFIHRDIAARNCLLTCPGPGRVAKIGDFGMARDIYRASYYRKGGCAMLPVKWMPPEAFMEGIFTSKTDTWSFGVLLWEIFSLGYMPYPSKSNQEVLEFVTSGGRMDPPKNCPGPVYRIMTQCWQHQPEDRPNFAIILERIEYCTQDPDVINTALPIEYGPLVEEEEKVPVRPKDPEGVPPLLVSQQAKREEERSPAAPPPLPTTSSGKAAKKPTAAEISVRVPRGPAVEGGHVNMAFSQSNPPSELHKVHGSRNKPTSLWNPTYGSWFTEKPTKKNNPIAKKEPHDRGNLGLEGSCTVPPNVATGRLPGASLLLEPSSLTANMKEVPLFRLRHFPCGNVNYGYQQQGLPLEAATAPGAGHYEDTILKSKNSMNQPGP

SEQ ID NO: 32969 - protein, 634 aa, Mus musculus
MGQRQSILKRCPEGSFLLLNTSADSKHTILSPWMRSSSDHCTLAVSVHRHLQPSGRYVAQLLPHNEAGREILLVPTPGKHGWTVLQGRVGRPANPFRVALEYISSGNRSLSAVDFFALKNCSEGTSPGSKMALQSSFTCWNGTVLQLGQACDFHQDCAQGEDEGQLCSKLPAGFYCNFENGFCGWTQSPLSPHMPRWQVRTLRDAHSQGHQGRALLLSTTDILASEGATVTSATFPAPMKNSPCELRMSWLIRGVLRGNVSLVLVENKTGKEQSRTVWHVATDEGLSLWQHTVLSLLDVTDRFWLQIVTWWGPGSRATVGFDNISISLDCYLTISGEEKMSLNSVPKSRNLFEKNPNKESKSWANISGPTPIFDPTVHWLFTTCGASGPHGPTQAQCNNAYQNSNLSVVVGSEGPLKGVQIWKVPATDTYSISGYGAAGGKGGKNTMMRSHGVSVLGIFNLEKGDTLYILVGQQGEDACPRANQLIQKVCVGENNVIEEEIRVNRSVHEWAGGGGGGGGATYVFKMKDGVPVPLIIAAGGGGRAYGAKTETFHPERLESNSSVLGLNGNSGAAGGGGGWNDNTSLLWAGKSLLEGAAGGHSCPQAMKKWGWETRGGFGGGGGGGAPQVEEAEDI

SEQ ID NO: 32970 - DNA, 4881 bp, Homo sapiens
  source 1..4881: mol_type = genomic DNA
acggcctcctccggcgggatgggagccatcgggctcctgtggctcctgccgctgctgctttccacggcagctgtgggctccgggatggggaccggccagcgcgcgggctccccagctgcggggccgccgctgcagccccgggagccactcagctactcgcgcctgcagaggaagagtctggcagttgacttcgtggtgccctcgctcttccgtgtctacgcccgggacctactgctgccaccatcctcctcggagctgaaggctggcaggcccgaggcccgcggctcgctagctctggactgcgccccgctgctcaggttgctggggccggcgccgggggtctcctggaccgccggttcaccagccccggcagaggcccggacgctgtccagggtgctgaagggcggctccgtgcgcaagctccggcgtgccaagcagttggtgctggagctgggcgaggaggcgatcttggagggttgcgtcgggccccccggggaggcggctgtggggctgctccagttcaatctcagcgagctgttcagttggtggattcgccaaggcgaagggcgactgaggatccgcctgatgcccgagaagaaggcgtcggaagtgggcagagagggaaggctgtccgcggcaattcgcgcctcccagccccgccttctcttccagatcttcgggactggtcatagctccttggaatcaccaacaaacatgccatctccttctcctgattattttacatggaatctcacctggataatgaaagactccttccctttcctgtctcatcgcagccgatatggtctggagtgcagctttgacttcccctgtgagctggagtattcccctccactgcatgacctcaggaaccagagctggtcctggcgccgcatcccctccgaggaggcctcccagatggacttgctggatgggcctggggcagagcgttctaaggagatgcccagaggctcctttctccttctcaacacctcagctgactccaagcacaccatcctgagtccgtggatgaggagcagcagtgagcactgcacactggccgtctcggtgcacaggcacctgcagccctctggaaggtacattgcccagctgctgccccacaacgaggctgcaagagagatcctcctgatgcccactccagggaagcatggttggacagtgctccagggaagaatcgggcgtccagacaacccatttcgagtggccctggaatacatctccagtggaaaccgcagcttgtctgcagtggacttctttgccctgaagaactgcagtgaaggaacatccccaggctccaagatggccctgcagagctccttcacttgttggaatgggacagtcctccagcttgggcaggcctgtgacttccaccaggactgtgcccagggagaagatgagagccagatgtgccggaaactgcctgtgggtttttactgcaactttgaagatggcttctgtggctggacccaaggcacactgtcaccccacactcctcagtggcaggtcaggaccctaaaggatgcccggttccaggaccaccaagaccatgctctattgctcagtaccactgatgtccccgcttctgaaagtgctacagtgaccagtgctacgtttcctgcaccgatcaagagctctccatgtgagctccgaatgtcctggctcattcgtggagtcttgaggggaaacgtgtccttggtgctagtggagaacaaaaccgggaaggagcaaggcaggatggtctggcatgtcgccgcctatgaaggcttgagcctgtggcagtggatggtgttgcctctcctcgatgtgtctgacaggttctggctgcagatggtcgcatggtggggacaaggatccagagccatcgtggcttttgacaatatctccatcagcctggactgctacctcaccattagcggagaggacaagatcctgcagaatacagcacccaaatcaagaaacctgtttgagagaaacccaaacaaggagctgaaacccggggaaaattcaccaagacagacccccatctttgaccctacagttcattggctgttcaccacatgtggggccagcgggccccatggccccacccaggcacagtgcaacaacgcctaccagaactccaacctgagcgtggaggtggggagcgagggccccctgaaaggcatccagatctggaaggtgccagccaccgacacctacagcatctcgggctacggagctgctggcgggaaaggcgggaagaacaccatgatgcggtcccacggcgtgtctgtgctgggcatcttcaacctggagaaggatgacatgctgtacatcctggttgggcagcagggagaggacgcctgccccagtacaaaccagttaatccagaaagtctgcattggagagaacaatgtgatagaagaagaaatccgtgtgaacagaagcgtgcatgagtgggcaggaggcggaggaggagggggtggagccacctacgtatttaagatgaaggatggagtgccggtgcccctgatcattgcagccggaggtggtggcagggcctacggggccaagacagacacgttccacccagagagactggagaataactcctcggttctagggctaaacggcaattccggagccgcaggtggtggaggtggctggaatgataacacttccttgctctgggccggaaaatctttgcaggagggtgccaccggaggacattcctgcccccaggccatgaagaagtgggggtgggagacaagagggggtttcggagggggtggaggggggtgctcctcaggtggaggaggcggaggatatataggcggcaatgcagcctcaaacaatgaccccgaaatggatggggaagatggggtttccttcatcagtccactgggcatcctgtacaccccagctttaaaagtgatggaaggccacggggaagtgaatattaagcattatctaaactgcagtcactgtgaggtagacgaatgtcacatggaccctgaaagccacaaggtcatctgcttctgtgaccacgggacggtgctggctgaggatggcgtctcctgcattgtgtcacccaccccggagccacacctgccactctcgctgatcctctctgtggtgacctctgccctcgtggccgccctggtcctggctttctccggcatcatgattgtgtaccgccggaagcaccaggagctgcaagccatgcagatggagctgcagagccctgagtacaagctgagcaagctccgcacctcgaccatcatgaccgactacaaccccaactactgctttgctggcaagacctcctccatcagtgacctgaaggaggtgccgcggaaaaacatcaccctcattcggggtctgggccatggagcctttggggaggtgtatgaaggccaggtgtccggaatgcccaacgacccaagccccctgcaagtggctgtgaagacgctgcctgaagtgtgctctgaacaggacgaactggatttcctcatggaagccctgatcatcagcaaattcaaccaccagaacattgttcgctgcattggggtgagcctgcaatccctgccccggttcatcctgctggagctcatggcggggggagacctcaagtccttcctccgagagacccgccctcgcccgagccagccctcctccctggccatgctggaccttctgcacgtggctcgggacattgcctgtggctgtcagtatttggaggaaaaccacttcatccaccgagacattgctgccagaaactgcctcttgacctgtccaggccctggaagagtggccaagattggagacttcgggatggcccgagacatctacagggcgagctactatagaaagggaggctgtgccatgctgccagttaagtggatgcccccagaggccttcatggaaggaatattcacttctaaaacagacacatggtcctttggagtgctgctatgggaaatcttttctcttggatatatgccataccccagcaaaagcaaccaggaagttctggagtttgtcaccagtggaggccggatggacccacccaagaactgccctgggcctgtataccggataatgactcagtgctggcaacatcagcctgaagacaggcccaactttgccatcattttggagaggattgaatactgcacccaggacccggatgtaatcaacaccgctttgccgatagaatatggtccacttgtggaagaggaagagaaagtgcctgtgaggcccaaggaccctgagggggttcctcctctcctggtctctcaacaggcaaaacgggaggaggagcgcagcccagctgccccaccacctctgcctaccacctcctctggcaaggctgcaaagaaacccacagctgcagaggtctctgttcgagtccctagagggccggccgtggaagggggacacgtgaatatggcattctctcagtccaaccctccttcggagttgcacagggtccacggatccagaaacaagcccaccagcttgtggaacccaacgtacggctcctggtttacagagaaacccaccaaaaagaataatcctatagcaaagaaggagccacacgagaggggtaacctggggctggagggaagctgtactgtcccacctaacgttgcaactgggagacttccgggggcctcactgctcctagagccctcttcgctgactgccaatatgaaggaggtacctctgttcaggctacgtcacttcccttgtgggaatgtcaattacggctaccagcaacagggcttgcccttagaagccgctactgcccctggagctggtcattacgaggataccattctgaaaagcaagaatagcatgaaccagcctgggccctga

SEQ ID NO: 32971 - DNA, 4863 bp, Homo sapiens
  source 1..4863: mol_type = genomic DNA
atgggagccatcgggctcctgtggctcctgccgctgctgctttccacggcagctgtgggctccgggatggggaccggccagcgcgcgggctccccagctgcggggccgccgctgcagccccgggagccactcagctactcgcgcctgcagaggaagagtctggcagttgacttcgtggtgccctcgctcttccgtgtctacgcccgggacctactgctgccaccatcctcctcggagctgaaggctggcaggcccgaggcccgcggctcgctagctctggactgcgccccgctgctcaggttgctggggccggcgccgggggtctcctggaccgccggttcaccagccccggcagaggcccggacgctgtccagggtgctgaagggcggctccgtgcgcaagctccggcgtgccaagcagttggtgctggagctgggcgaggaggcgatcttggagggttgcgtcgggccccccggggaggcggctgtggggctgctccagttcaatctcagcgagctgttcagttggtggattcgccaaggcgaagggcgactgaggatccgcctgatgcccgagaagaaggcgtcggaagtgggcagagagggaaggctgtccgcggcaattcgcgcctcccagccccgccttctcttccagatcttcgggactggtcatagctccttggaatcaccaacaaacatgccttctccttctcctgattattttacatggaatctcacctggataatgaaagactccttccctttcctgtctcatcgcagccgatatggtctggagtgcagctttgacttcccctgtgagctggagtattcccctccactgcatgacctcaggaaccagagctggtcctggcgccgcatcccctccgaggaggcctcccagatggacttgctggatgggcctggggcagagcgttctaaggagatgcccagaggctcctttctccttctcaacacctcagctgactccaagcacaccatcctgagtccgtggatgaggagcagcagtgagcactgcacactggccgtctcggtgcacaggcacctgcagccctctggaaggtacattgcccagctgctgccccacaacgaggctgcaagagagatcctcctgatgcccactccagggaagcatggttggacagtgctccagggaagaatcgggcgtccagacaacccatttcgagtggccctggaatacatctccagtggaaaccgcagcttgtctgcagtggacttctttgccctgaagaactgcagtgaaggaacatccccaggctccaagatggccctgcagagctccttcacttgttggaatgggacagtcctccagcttgggcaggcctgtgacttccaccaggactgtgcccagggagaagatgagagccagatgtgccggaaactgcctgtgggtttttactgcaactttgaagatggcttctgtggctggacccaaggcacactgtcaccccacactcctcaatggcaggtcaggaccctaaaggatgcccggttccaggaccaccaagaccatgctctattgctcagtaccactgatgtccccgcttctgaaagtgctacagtgaccagtgctacgtttcctgcaccgatcaagagctctccatgtgagctccgaatgtcctggctcattcgtggagtcttgaggggaaacgtgtccttggtgctagtggagaacaaaaccgggaaggagcaaggcaggatggtctggcatgtcgccgcctatgaaggcttgagcctgtggcagtggatggtgttgcctctcctcgatgtgtctgacaggttctggctgcagatggtcgcatggtggggacaaggatccagagccatcgtggcttttgacaatatctccatcagcctggactgctacctcaccattagcggagaggacaagatcctgcagaatacagcacccaaatcaagaaacctgtttgagagaaacccaaacaaggagctgaaacccggggaaaattcaccaagacagacccccatctttgaccctacagttcattggctgttcaccacatgtggggccagcgggccccatggccccacccaggcacagtgcaacaacgcctaccagaactccaacctgagcgtggaggtggggagcgagggccccctgaaaggcatccagatctggaaggtgccagccaccgacacctacagcatctcgggctacggagctgctggcgggaaaggcgggaagaacaccatgatgcggtcccacggcgtgtctgtgctgggcatcttcaacctggagaaggatgacatgctgtacatcctggttgggcagcagggagaggacgcctgccccagtacaaaccagttaatccagaaagtctgcattggagagaacaatgtgatagaagaagaaatccgtgtgaacagaagcgtgcatgagtgggcaggaggcggaggaggagggggtggagccacctacgtatttaagatgaaggatggagtgccggtgcccctgatcattgcagccggaggtggtggcagggcctacggggccaagacagacacgttccacccagagagactggagaataactcctcggttctagggctaaacggcaattccggagccgcaggtggtggaggtggctggaatgataacacttccttgctctgggccggaaaatctttgcaggagggtgccaccggaggacattcctgcccccaggccatgaagaagtgggggtgggagacaagagggggtttcggagggggtggaggggggtgctcctcaggtggaggaggcggaggatatataggcggcaatgcagcctcaaacaatgaccccgaaatggatggggaagatggggtttccttcatcagtccactgggcatcctgtacaccccagctttaaaagtgatggaaggccacggggaagtgaatattaagcattatctaaactgcagtcactgtgaggtagacgaatgtcacatggaccctgaaagccacaaggtcatctgcttctgtgaccacgggacggtgctggctgaggatggcgtctcctgcattgtgtcacccaccccggagccacacctgccactctcgctgatcctctctgtggtgacctctgccctcgtggccgccctggtcctggctttctccggcatcatgattgtgtaccgccggaagcaccaggagctgcaagccatgcagatggagctgcagagccctgagtacaagctgagcaagctccgcacctcgaccatcatgaccgactacaaccccaactactgctttgctggcaagacctcctccatcagtgacctgaaggaggtgccgcggaaaaacatcaccctcattcggggtctgggccatggcgcctttggggaggtgtatgaaggccaggtgtccggaatgcccaacgacccaagccccctgcaagtggctgtgaagacgctgcctgaagtgtgctctgaacaggacgaactggatttcctcatggaagccctgatcatcagcaaattcaaccaccagaacattgttcgctgcattggggtgagcctgcaatccctgccccggttcatcctgctggagctcatggtggggggagacctcaagtccttcctccgagagacccgccctcgcccgagccagccctcctccctggccatgctggaccttctgcacgtggctcgggacattgcctgtggctgtcagtatttggaggaaaaccacttcatccaccgagacattgctgccagaaactgcctcttgacctgtccaggccctggaagagtggccaagattggagacttcgggatggcccgagacatctacagggcgagctactatagaaagggaggctgtgccatgctgccagttaagtggatgcccccagaggccttcatggaaggaatattcacttctaaaacagacacatggtcctttggagtgctgctatgggaaatcttttctcttggatatatgccataccccagcaaaagcaaccaggaagttctggagtttgtcaccagtggaggccggatggacccacccaagaactgccctgggcctgtataccggataatgactcagtgctggcaacatcagcctgaagacaggcccaactttgccatcattttggagaggattgaatactgcacccaggacccggatgtaatcaacaccgctttgccgatagaatatggtccacttgtggaagaggaagagaaagtgcctgtgaggcccaaggaccctgagggggttcctcctctcctggtctctcaacaggcaaaacgggaggaggagcgcagcccagctgccccaccacctctgcctaccacctcctctggcaaggctgcaaagaaacccacagctgcagagatctctgttcgagtccctagagggccggccgtggaagggggacacgtgaatatggcattctctcagtccaaccctccttcggagttgcacaaggtccacggatccagaaacaagcccaccagcttgtggaacccaacgtacggctcctggtttacagagaaacccaccaaaaagaataatcctatagcaaagaaggagccacacgacaggggtaacctggggctggagggaagctgtactgtcccacctaacgttgcaactgggagacttccgggggcctcactgctcctagagccctcttcgctgactgccaatatgaaggaggtacctctgttcaggctacgtcacttcccttgtgggaatgtcaattacggctaccagcaacagggcttgcccttagaagccgctactgcccctggagctggtcattacgaggataccattctgaaaagcaagaatagcatgaaccagcctgggccctga

SEQ ID NO: 32972 - DNA, 4863 bp, Homo sapiens
  source 1..4863: mol_type = genomic DNA
atgggagccatcgggctcctgtggctcctgccgctgctgctttccacggcagctgtgggctccgggatggggaccggccagcgcgcgggctccccagctgcggggccgccgctgcagccccgggagccactcagctactcgcgcctgcagaggaagagtctggcagttgacttcgtggtgccctcgctcttccgtgtctacgcccgggacctactgctgccaccatcctcctcggagctgaaggctggcaggcccgaggcccgcggctcgctagctctggactgcgccccgctgctcaggttgctggggccggcgccgggggtctcctggaccgccggttcaccagccccggcagaggcccggacgctgtccagggtgctgaagggcggctccgtgcgcaagctccggcgtgccaagcagttggtgctggagctgggcgaggaggcgatcttggagggttgcgtcgggccccccggggaggcggctgtggggctgctccagttcaatctcagcgagctgttcagttggtggattcgccaaggcgaagggcgactgaggatccgcctgatgcccgagaagaaggcgtcggaagtgggcagagagggaaggctgtccgcggcaattcgcgcctcccagccccgccttctcttccagatcttcgggactggtcatagctccttggaatcaccaacaaacatgccttctccttctcctgattattttacatggaatctcacctggataatgaaagactccttccctttcctgtctcatcgcagccgatatggtctggagtgcagctttgacttcccctgtgagctggagtattcccctccactgcatgacctcaggaaccagagctggtcctggcgccgcatcccctccgaggaggcctcccagatggacttgctggatgggcctggggcagagcgttctaaggagatgcccagaggctcctttctccttctcaacacctcagctgactccaagcacaccatcctgagtccgtggatgaggagcagcagtgagcactgcacactggccgtctcggtgcacaggcacctgcagccctctggaaggtacattgcccagctgctgccccacaacgaggctgcaagagagatcctcctgatgcccactccagggaagcatggttggacagtgctccagggaagaatcgggcgtccagacaacccatttcgagtggccctggaatacatctccagtggaaaccgcagcttgtctgcagtggacttctttgccctgaagaactgcagtgaaggaacatccccaggctccaagatggccctgcagagctccttcacttgttggaatgggacagtcctccagcttgggcaggcctgtgacttccaccaggactgtgcccagggagaagatgagagccagatgtgccggaaactgcctgtgggtttttactgcaactttgaagatggcttctgtggctggacccaaggcacactgtcaccccacactcctcaatggcaggtcaggaccctaaaggatgcccggttccaggaccaccaagaccatgctctattgctcagtaccactgatgtccccgcttctgaaagtgctacagtgaccagtgctacgtttcctgcaccgatcaagagctctccatgtgagctccgaatgtcctggctcattcgtggagtcttgaggggaaacgtgtccttggtgctagtggagaacaaaaccgggaaggagcaaggcaggatggtctggcatgtcgccgcctatgaaggcttgagcctgtggcagtggatggtgttgcctctcctcgatgtgtctgacaggttctggctgcagatggtcgcatggtggggacaaggatccagagccatcgtggcttttgacaatatctccatcagcctggactgctacctcaccattagcggagaggacaagatcctgcagaatacagcacccaaatcaagaaacctgtttgagagaaacccaaacaaggagctgaaacccggggaaaattcaccaagacagacccccatctttgaccctacagttcattggctgttcaccacatgtggggccagcgggccccatggccccacccaggcacagtgcaacaacgcctaccagaactccaacctgagcgtggaggtggggagcgagggccccctgaaaggcatccagatctggaaggtgccagccaccgacacctacagcatctcgggctacggagctgctggcgggaaaggcgggaagaacaccatgatgcggtcccacggcgtgtctgtgctgggcatcttcaacctggagaaggatgacatgctgtacatcctggttgggcagcagggagaggacgcctgccccagtacaaaccagttaatccagaaagtctgcattggagagaacaatgtgatagaagaagaaatccgtgtgaacagaagcgtgcatgagtgggcaggaggcggaggaggagggggtggagccacctacgtatttaagatgaaggatggagtgccggtgcccctgatcattgcagccggaggtggtggcagggcctacggggccaagacagacacgttccacccagagagactggagaataactcctcggttctagggctaaacggcaattccggagccgcaggtggtggaggtggctggaatgataacacttccttgctctgggccggaaaatctttgcaggagggtgccaccggaggacattcctgcccccaggccatgaagaagtgggggtgggagacaagagggggtttcggagggggtggaggggggtgctcctcaggtggaggaggcggaggatatataggcggcaatgcagcctcaaacaatgaccccgaaatggatggggaagatggggtttccttcatcagtccactgggcatcctgtacaccccagctttaaaagtgatggaaggccacggggaagtgaatattaagcattatctaaactgcagtcactgtgaggtagacgaatgtcacatggaccctgaaagccacaaggtcatctgcttctgtgaccacgggacggtgctggctgaggatggcgtctcctgcattgtgtcacccaccccggagccacacctgccactctcgctgatcctctctgtggtgacctctgccctcgtggccgccctggtcctggctttctccggcatcatgattgtgtaccgccggatgcaccaggagctgcaagccatgcagatggagctgcagagccctgagtacaagctgagcaagctccgcacctcgaccatcatgaccgactacaaccccaactactgctttgctggcaagacctcctccatcagtgacctgaaggaggtgccgcggaaaaacatcaccctcattcggggtctgggccatggcgcctttggggaggtgtatgaaggccaggtgtccggaatgcccaacgacccaagccccctgcaagtggctgtgaagacgctgcctgaagtgtgctctgaacaggacgaactggatttcctcatggaagccctgatcatcagcaaattcaaccaccagaacattgttcgctgcattggggtgagcctgcaatccctgccccggttcatcctgctggagctcatggcggggggagacctcaagtccttcctccgagagacccgccctcgcccgagccagccctcctccctggccatgctggaccttctgcacgtggctcgggacattgcctgtggctgtcagtatttggaggaaaaccacttcatccaccgagacattgctgccagaaactgcctcttgacctgtccaggccctggaagagtggccaagattggagacttcgggatggcccgagacatctacagggcgagctactatagaaagggaggctgtgccatgctgccagttaagtggatgcccccagaggccttcatggaaggaatattcacttctaaaacagacacatggtcctttggagtgctgctatgggaaatcttttctcttggatatatgccataccccagcaaaagcaaccaggaagttctggagtttgtcaccagtggaggccggatggacccacccaagaactgccctgggcctgtataccggataatgactcagtgctggcaacatcagcctgaagacaggcccaactttgccatcattttggagaggattgaatactgcacccaggacccggatgtaatcaacaccgctttgccgatagaatatggtccacttgtggaagaggaagagaaagtgcctgtgaggcccaaggaccctgagggggttcctcctctcctggtctctcaacaggcaaaacgggaggaggagcgcagcccagctgccccaccacctctgcctaccacctcctctggcaaggctgcaaagaaacccacagctgcagagatctctgttcgagtccctagagggccggccgtggaagggggacacgtgaatatggcattctctcagtccaaccctccttcggagttgcacaaggtccacggatccagaaacaagcccaccagcttgtggaacccaacgtacggctcctggtttacagagaaacccaccaaaaagaataatcctatagcaaagaaggagccacacgacaggggtaacctggggctggagggaagctgtactgtcccacctaacgttgcaactgggagacttccgggggcctcactgctcctagagccctcttcgctgactgccaatatgaaggaggtacctctgttcaggctacgtcacttcccttgtgggaatgtcaattacggctaccagcaacagggcttgcccttagaagccgctactgcccctggagctggtcattacgaggataccattctgaaaagcaagaatagcatgaaccagcctgggccctga

SEQ ID NO: 32973 - DNA, 6240 bp, Homo sapiens
  source 1..6240: mol_type = genomic DNA
agatgcgatccagcggctctgggggcggcagcggtggtagcagctggtacctcccgccgcctctgttcggagggtcgcggggcaccgaggtgctttccggccgccctctggtcggccacccaaagccgcgggcgctgatgatgggtgaggagggggcggcaagatttcgggcgcccctgccctgaacgccctcagctgctgccgccggggccgctccagtgcctgcgaactctgaggagccgaggcgccggtgagagcaaggacgctgcaaacttgcgcagcgcgggggctgggattcacgcccagaagttcagcaggcagacagtccgaagccttcccgcagcggagagatagcttgagggtgcgcaagacggcagcctccgccctcggttcccgcccagaccgggcagaagagcttggaggagccaaaaggaacgcaaaaggcggccaggacagcgtgcagcagctgggagccgccgttctcagccttaaaagttgcagagattggaggctgccccgagaggggacagaccccagctccgactgcggggggcaggagaggacggtacccaactgccacctcccttcaaccatagtagttcctctgtaccgagcgcagcgagctacagacgggggcgcggcactcggcgcggagagcgggaggctcaaggtcccagccagtgagcccagtgtgcttgagtgtctctggactcgcccctgagcttccaggtctgtttcatttagactcctgctcgcctccgtgcagttgggggaaagcaagagacttgcgcgcacgcacagtcctctggagatcaggtggaaggagccgctgggtaccaaggactgttcagagcctcttcccatctcggggagagcgaagggtgaggctgggcccggagagcagtgtaaacggcctcctccggcgggatgggagccatcgggctcctgtggctcctgccgctgctgctttccacggcagctgtgggctccgggatggggaccggccagcgcgcgggctccccagctgcggggccgccgctgcagccccgggagccactcagctactcgcgcctgcagaggaagagtctggcagttgacttcgtggtgccctcgctcttccgtgtctacgcccgggacctactgctgccaccatcctcctcggagctgaaggctggcaggcccgaggcccgcggctcgctagctctggactgcgccccgctgctcaggttgctggggccggcgccgggggtctcctggaccgccggttcaccagccccggcagaggcccggacgctgtccagggtgctgaagggcggctccgtgcgcaagctccggcgtgccaagcagttggtgctggagctgggcgaggaggcgatcttggagggttgcgtcgggccccccggggaggcggctgtggggctgctccagttcaatctcagcgagctgttcagttggtggattcgccaaggcgaagggcgactgaggatccgcctgatgcccgagaagaaggcgtcggaagtgggcagagagggaaggctgtccgcggcaattcgcgcctcccagccccgccttctcttccagatcttcgggactggtcatagctccttggaatcaccaacaaacatgccttctccttctcctgattattttacatggaatctcacctggataatgaaagactccttccctttcctgtctcatcgcagccgatatggtctggagtgcagctttgacttcccctgtgagctggagtattcccctccactgcatgacctcaggaaccagagctggtcctggcgccgcatcccctccgaggaggcctcccagatggacttgctggatgggcctggggcagagcgttctaaggagatgcccagaggctcctttctccttctcaacacctcagctgactccaagcacaccatcctgagtccgtggatgaggagcagcagtgagcactgcacactggccgtctcggtgcacaggcacctgcagccctctggaaggtacattgcccagctgctgccccacaacgaggctgcaagagagatcctcctgatgcccactccagggaagcatggttggacagtgctccagggaagaatcgggcgtccagacaacccatttcgagtggccctggaatacatctccagtggaaaccgcagcttgtctgcagtggacttctttgccctgaagaactgcagtgaaggaacatccccaggctccaagatggccctgcagagctccttcacttgttggaatgggacagtcctccagcttgggcaggcctgtgacttccaccaggactgtgcccagggagaagatgagagccagatgtgccggaaactgcctgtgggtttttactgcaactttgaagatggcttctgtggctggacccaaggcacactgtcaccccacactcctcaatggcaggtcaggaccctaaaggatgcccggttccaggaccaccaagaccatgctctattgctcagtaccactgatgtccccgcttctgaaagtgctacagtgaccagtgctacgtttcctgcaccgatcaagagctctccatgtgagctccgaatgtcctggctcattcgtggagtcttgaggggaaacgtgtccttggtgctagtggagaacaaaaccgggaaggagcaaggcaggatggtctggcatgtcgccgcctatgaaggcttgagcctgtggcagtggatggtgttgcctctcctcgatgtgtctgacaggttctggctgcagatggtcgcatggtggggacaaggatccagagccatcgtggcttttgacaatatctccatcagcctggactgctacctcaccattagcggagaggacaagatcctgcagaatacagcacccaaatcaagaaacctgtttgagagaaacccaaacaaggagctgaaacccggggaaaattcaccaagacagacccccatctttgaccctacagttcattggctgttcaccacatgtggggccagcgggccccatggccccacccaggcacagtgcaacaacgcctaccagaactccaacctgagcgtggaggtggggagcgagggccccctgaaaggcatccagatctggaaggtgccagccaccgacacctacagcatctcgggctacggagctgctggcgggaaaggcgggaagaacaccatgatgcggtcccacggcgtgtctgtgctgggcatcttcaacctggagaaggatgacatgctgtacatcctggttgggcagcagggagaggacgcctgccccagtacaaaccagttaatccagaaagtctgcattggagagaacaatgtgatagaagaagaaatccgtgtgaacagaagcgtgcatgagtgggcaggaggcggaggaggagggggtggagccacctacgtatttaagatgaaggatggagtgccggtgcccctgatcattgcagccggaggtggtggcagggcctacggggccaagacagacacgttccacccagagagactggagaataactcctcggttctagggctaaacggcaattccggagccgcaggtggtggaggtggctggaatgataacacttccttgctctgggccggaaaatctttgcaggagggtgccaccggaggacattcctgcccccaggccatgaagaagtgggggtgggagacaagagggggtttcggagggggtggaggggggtgctcctcaggtggaggaggcggaggatatataggcggcaatgcagcctcaaacaatgaccccgaaatggatggggaagatggggtttccttcatcagtccactgggcatcctgtacaccccagctttaaaagtgatggaaggccacggggaagtgaatattaagcattatctaaactgcagtcactgtgaggtagacgaatgtcacatggaccctgaaagccacaaggtcatctgcttctgtgaccacgggacggtgctggctgaggatggcgtctcctgcattgtgtcacccaccccggagccacacctgccactctcgctgatcctctctgtggtgacctctgccctcgtggccgccctggtcctggctttctccggcatcatgattgtgtaccgccggaagcaccaggagctgcaagccatgcagatggagctgcagagccctgagtacaagctgagcaagctccgcacctcgaccatcatgaccgactacaaccccaactactgctttgctggcaagacctcctccatcagtgacctgaaggaggtgccgcggaaaaacatcaccctcattcggggtctgggccatggcgcctttggggaggtgtatgaaggccaggtgtccggaatgcccaacgacccaagccccctgcaagtggctgtgaagacgctgcctgaagtgtgctctgaacaggacgaactggatttcctcatggaagccctgatcatcagcaaattcaaccaccagaacattgttcgctgcattggggtgagcctgcaatccctgccccggttcatcctgctggagctcatggcggggggagacctcaagtccttcctccgagagacccgccctcgcccgagccagccctcctccctggccatgctggaccttctgcacgtggctcgggacattgcctgtggctgtcagtatttggaggaaaaccacttcatccaccgagacattgctgccagaaactgcctcttgacctgtccaggccctggaagagtggccaagattggagacttcgggatggcccgagacatctacagggcgagctactatagaaagggaggctgtgccatgctgccagttaagtggatgcccccagaggccttcatggaaggaatattcacttctaaaacagacacatggtcctttggagtgctgctatgggaaatcttttctcttggatatatgccataccccagcaaaagcaaccaggaagttctggagtttgtcaccagtggaggccggatggacccacccaagaactgccctgggcctgtataccggataatgactcagtgctggcaacatcagcctgaagacaggcccaactttgccatcattttggagaggattgaatactgcacccaggacccggatgtaatcaacaccgctttgccgatagaatatggtccacttgtggaagaggaagagaaagtgcctgtgaggcccaaggaccctgagggggttcctcctctcctggtctctcaacaggcaaaacgggaggaggagcgcagcccagctgccccaccacctctgcctaccacctcctctggcaaggctgcaaagaaacccacagctgcagagatctctgttcgagtccctagagggccggccgtggaagggggacacgtgaatatggcattctctcagtccaaccctccttcggagttgcacaaggtccacggatccagaaacaagcccaccagcttgtggaacccaacgtacggctcctggtttacagagaaacccaccaaaaagaataatcctatagcaaagaaggagccacacgacaggggtaacctggggctggagggaagctgtactgtcccacctaacgttgcaactgggagacttccgggggcctcactgctcctagagccctcttcgctgactgccaatatgaaggaggtacctctgttcaggctacgtcacttcccttgtgggaatgtcaattacggctaccagcaacagggcttgcccttagaagccgctactgcccctggagctggtcattacgaggataccattctgaaaagcaagaatagcatgaaccagcctgggccctgagctcggtcgcacactcacttctcttccttgggatccctaagaccgtggaggagagagaggcaatggctccttcacaaaccagagaccaaatgtcacgttttgttttgtgccaacctattttgaagtaccaccaaaaaagctgtattttgaaaatgctttagaaaggttttgagcatgggttcatcctattctttcgaaagaagaaaatatcataaaaatgagtgataaatacaaggcccagatgtggttgcataaggtttttatgcatgtttgttgtatacttccttatgcttctttcaaattgtgtgtgctctgcttcaatgtagtcagaattagctgcttctatgtttcatagttggggtcatagatgtttccttgccttgttgatgtggacatgagccatttgaggggagagggaacggaaataaaggagttatttgtaatgactaa

SEQ ID NO: 32974 - DNA, 5918 bp, Mus musculus
  source 1..5918: mol_type = genomic DNA
gtgttcacgcccagaagttcagcgggcagggtgatcgatccgaagacttcctgcagcggaggtcacttgagggggcgctagaaagcagccccctccggtggtccttgcctagacctgggaaggagcgcagaggaggtgacaggagcggaggacgtgggcaagacagtgaccgactcggagccacggttcacagcctggaaagttgcagaagattggaagctaagaggagagctctggtcgccgagggctccttgaacggtacctaattgccacctccctggtccctgagcaaaggcctctacaaatggggcgcagcacggcgagaggcgcaggatccagctgttgagcccagggtgtctcactgtctccgaactaccccctgactttgtcttccgttttgctgagaacccttctcgcctccttgtagcttgggaaaagcaagggcgctctatagtgtacacacagtccctgagatctagtggaaggagccattcaggaccaaggactatttggagccctttcctgtttgggggagagtgaagggcgaggctggaccagcaagggaagggagactagtgtaaactcgccctccagcgggatgggagctgctgggttcctgtggctgctgcctccactgcttttggcagcagcctcgtactccggagctgcaaccgatcagcgcgcgggttccccagcctcagggcctcctctgcagccccgggagccgctcagttattcgcgcctgcagaggaagagtctggcagtggacttcgttgtaccctcgctcttccgcgtctatgcccgagacctgctgctaccgcagccacggtccccctcggagcccgaggctggcgggctggaggcgcggggatcactggccctggattgtgagcctctgctcaggctgctggggccactgcctggaatctcctgggcagatggagccagttctcctagtcccgaggcgggtccgacgctgtccagggtgctgaagggaggctcggtgcgcaagctcaggcgtgccaaacagctggtgctggagctgggcgaggagacgattcttgaaggctgtattggtcccccagaggaggtagcggctgtggggatactccagttcaacctcagcgagctgttcagctggtggattctccacggcgaagggaggctgaggatccgcctgatgcctgagaagaaggcatcggaagtgggcagggagggaaggctatccagtgcgatccgagcctcccagccccgccttctcttccagatcttcgggacgggacacagctccatggagtcaccctcagaaacgccttctcctcctggtaccttcatgtggaatctgacctggacgatgaaagactccttccctttcctttcccaccgcagtcgatatggtctggagtgcagctttgacttcccctgtgagctggaatattctcctcccctgcacaaccacgggaatcagagctggtcctggcgccatgtgccctccgaggaggcctcgaggatgaacttgctggatgggccagaggcagagcattctcaagagatgcccagaggctccttcctcctcctgaacacctctgcagattccaagcataccattctgagcccatggatgaggagcagtagtgatcactgcacactggctgtctccgtgcacagacatctacagccttcggggagatatgttgcccagctcctaccccacaacgaagctggaagagagattcttttggtgcccaccccagggaagcatggctggacagtgctgcaggggagagtcgggcgcccagcaaacccatttcgagtggctctggaatacatctccagtggcaaccggagcttgtcggcggtggatttctttgccctgaagaactgcagtgaagggacatccccaggctccaagatggcattgcagagttccttcacttgttggaatgggaccgtcctccagctcgggcaagcctgtgatttccaccaggactgtgcccaaggagaagatgagggccagctgtgcagtaaacttcctgctggattttactgtaactttgaaaatggcttctgtggctggacccaaagtccactctcaccccatatgccccggtggcaagtgaggaccctaagagatgcccattcccagggccaccaaggccgtgccctgttgctcagcaccactgacatcctcgcttctgaaggtgcaacagtgaccagtgccaccttccctgcaccaatgaaaaattctccttgtgagctccgcatgtcctggctcatccgcggggttttgagaggaaacgtatctctggtgctggtggagaacaaaaccggaaaggagcaaagccggactgtctggcatgtcgccactgacgaaggcttaagcctgtggcagcatacagtgctgtccctcctcgatgtgactgacaggttctggctgcagatagtcacatggtggggtccaggatccagggcaaccgtgggatttgacaacatttccatcagcctcgactgctaccttaccatcagtggagaggagaaaatgtccctgaattcagtacccaaatctagaaatctgtttgagaaaaacccaaacaaggagtcaaaatcctgggcaaacatatcaggaccaactcccatcttcgaccctacagttcactggctgttcaccacgtgtggggccagtggacctcatggccccacccaggcacagtgcaacaacgcctaccagaattccaacttgagcgtggtggtgggaagtgaagggcccttgaagggagtccagatttggaaagtgccagctactgacacctacagtatctcgggctacggagcagctggcgggaaaggtgggaaaaacaccatgatgcggtcccatggcgtgtctgtcctgggcatcttcaatctggagaaaggtgacacactctacatccttgtcggtcagcaaggggaggatgcctgtcccagggcaaaccaactaatccagaaagtctgtgtgggtgagaacaatgtcatagaagaagagatccgagtgaacagaagcgtgcacgagtgggcaggaggaggaggaggtgggggtggagccacctacgtgtttaagatgaaagatggcgtgcctgtacccctgatcattgcagctggtggtggtggcagggcctatggggccaagacagaaacgttccacccagagagactggagagtaactcctcggttctagggctgaacggcaattccggagccgcaggtggtggaggcggctggaatgataacacttccttgctctgggccggaaagtctttgctggagggtgccgccggaggacattcctgcccccaggccatgaagaagtgggggtgggagacaagagggggtttcggagggggtggaggggggtgctcctcaggtggaggaggcggaggatatataggtggcaacgcagcatcaaacaatgaccccgaaatggatggggaagatggggtttccttcatcagtccattgggtatcctgtacaccccggccttaaaagtgatggagggccacggggaagtgaatatcaagcattatctaaactgcagtcactgcgaggtagacgaatgtcacatggaccccgagagccacaaagtcatctgcttctgtgatcatgggaccgtgctggctgatgatggtgtctcctgcattgtgtcacccaccccggagccccacctgccgctctcattgatcctctccgtcgtgacctctgccctggtggctgcccttgttctggcattctccggcatcatgattgtgtaccgtcggaagcaccaggagttgcaggctatgcagatggaactgcagagccccgagtataagctgagcaagctacggacctcgaccatcatgaccgactacaaccccaactactgcttcgctggcaagacttcctccatcagtgacctgaaagaagtgccacggaaaaacatcacactcatccggggcctaggccatggcgcatttggggaggtgtatgaaggccaggtgtctggaatgcccaatgacccaagccctctacaagtggctgtaaagacgctgccagaagtgtgttcagaacaagatgagctggactttctcatggaagctctgatcatcagcaaattcaaccaccagaatattgttcgctgcatcggggtgagtctacaagccctgccccgcttcatcctgctggaactcatggctggcggagacctcaagtccttcctcagggagacacgccctcgcccgaaccaacccacctccctggccatgctggaccttctgcatgtggctcgggacattgcctgtggctgtcagtacctagaggagaatcactttatccaccgggatattgctgctagaaactgtctgttgacctgcccaggagctggaagaatagcaaagattggagactttgggatggcccgagatatctacagggccagctactaccgaaagggaggctgcgccatgctgccggtcaagtggatgccccctgaagccttcatggaagggatatttacctctaaaacagacacatggtcttttggagtgttgctatgggaaatattttctcttggatatatgccgtaccccagcaagagcaaccaggaagttctggagtttgtcaccagcggaggacggatggacccgcctaagaactgccccgggcctgtataccggataatgacgcagtgctggcagcatcagcctgaagacagacccaacttcgccatcattttggagaggatcgaatactgcacccaggaccccgatgtgatcaacacagctctgcccatcgaatacggtccagtagtagaagaggaggagaaagtgcccatgcgccccaaagaccccgaggggatgccacctttgctggtgtctccccagcctgcgaagcacgaggaggcgtccgcagctccccagcccgcagccctgacggcaccaggcccatcggtgaagaagcccccgggtgcgggtgcgggcgcgggcgcgggtgcgggtgccggcccggtgccccgaggtgcggccgatcggggccacgtgaacatggctttctctcagcccaaccctcccccggagctgcacaaaggcccgggatccagaaacaagccgaccagcctgtggaaccccacctacggctcgtggttcaccgagaagcctgccaaaaagacccatcctccgccaggcgccgagccgcaggcgcgggcaggagcggccgagggtggctggaccgggccgggcgcggggccccgcagagccgaggcagcgctgctgctagagccatcggcgctgagcgccaccatgaaggaggtgccgctgttcaggctgcgccacttcccctgcggcaatgtcaactatggttaccagcaacagggtctccccttggaagccacagccgcgccaggggacaccatgctgaaaagcaagaataaggtcacccagccggggccctgagccctgtactccactagcttctcctcctggcggagccggagcccacccagagggagatggacaggatggctccaccacaaacccaagaccaaaactttcatttttgtgccaacttgttttgaagtgccacattttaaaaaaaggaaacttgtgtttttaagatgtgttagaaggttttttgagcatgggttcatctatcctctcaaaagaagaaaatgccattctttaaaaaagaaaaaaaagcaatcagtgcaaggcccagattggttgcgccaagttttcgtgcatggtctgctgtacagtcccctaaggcttctttccgatttttgtgtgcgctctgcttccgcgtagtcagaaatagctgcttccatgtctcatagggggagtcctaggtgtttcctttgccttatgaatatgaaccactcgaggggcgggcgagggaacagaaataaag

SEQ ID NO: 32975 - protein, 680 aa, Homo sapiens [sequence omitted]

SEQ ID NO: 32976 - protein, 680 aa, Homo sapiens
MEDSMDMDMSPLRPQNYLFGCELKADKDYHFKVDNDENEHQLSLRTVSLGAGAKDELHIVEAEAMNYEGSPIKVTLATLKMSVQPTVSLGGFEITPPVVLRLKCGSGPVHISGQHLVVYRRKHQELQAMQMELQSPEYKLSKLRTSTIMTDYNPNYCFAGKTSSISDLKEVPRKNITLIRGLGHGAFGEVYEGQVSGMPNDPSPLQVAVKTLPEVCSEQDELDFLMEALIISKFNHQNIVRCIGVSLQSLPRFILLELMAGGDLKSFLRETRPRPSQPSSLAMLDLLHVARDIACGCQYLEENHFIHRDIAARNCLLTCPGPGRVAKIGDFGMARDIYRASYYRKGGCAMLPVKWMPPEAFMEGIFTSKTDTWSFGVLLWEIFSLGYMPYPSKSNQEVLEFVTSGGRMDPPKNCPGPVYRIMTQCWQHQPEDRPNFAIILERIEYCTQDPDVINTALPIEYGPLVEEEEKVPVRPKDPEGVPPLLVSQQAKREEERSPAAPPPLPTTSSGKAAKKPTAAEVSVRVPRGPAVEGGHVNMAFSQSNPPSELHKVHGSRNKPTSLWNPTYGSWFTEKPTKKNNPIAKKEPHDRGNLGLEGSCTVPPNVATGRLPGASLLLEPSSLTANMKEVPLFRLRHFPCGNVNYGYQQQGLPLEAATAPGAGHYEDTILKSKNSMNQPGP

SEQ ID NO: 32977 - DNA, 2043 bp, Homo sapiens
  source 1..2043: mol_type = genomic DNA
atggaagattcgatggacatggacatgagccccctgaggccccagaactatcttttcggttgtgaactaaaggccgacaaagattatcactttaaggtggataatgatgaaaatgagcaccagttatctttaagaacggtcagtttaggggctggtgcaaaggatgagttgcacattgttgaagcagaggcaatgaattacgaaggcagtccaattaaagtaacactggcaactttgaaaatgtctgtacagccaacggtttcccttgggggctttgaaataacaccaccagtggtcttaaggttgaagtgtggttcagggccagtgcatattagtggacagcacttagtagtgtaccgccggaagcaccaggagctgcaagccatgcagatggagctgcagagccctgagtacaagctgagcaagctccgcacctcgaccatcatgaccgactacaaccccaactactgctttgctggcaagacctcctccatcagtgacctgaaggaggtgccacggaaaaacatcaccctcattcggggtctgggccatggagcctttggggaggtgtatgaaggccaggtgtccggaatgcccaacgacccaagccccctgcaagtggctgtgaagacgctgcctgaagtgtgctctgaacaggacgaactggatttcctcatggaagccctgatcatcagcaaattcaaccaccagaacattgttcgctgcattggggtgagcctgcaatccctgccccggttcatcctgctggagctcatggcggggggagacctcaagtccttcctccgagagacccgccctcgcccgagccagccctcctccctggccatgctggaccttctgcacgtggctcgggacattgcctgtggctgtcagtatttggaggaaaaccacttcatccaccgagacattgctgccagaaactgcctcttgacctgtccaggccctggaagagtggccaagattggagacttcgggatggcccgagacatctacagggcgagctactatagaaagggaggctgtgccatgctgccagttaagtggatgcccccagaggccttcatggaaggaatattcacttctaaaacagacacatggtcctttggagtgctgctatgggaaatcttttctcttggatatatgccataccccagcaaaagcaaccaggaagttctggagtttgtcaccagtggaggccggatggacccacccaagaactgccctgggcctgtataccggataatgactcagtgctggcaacatcagcctgaagacaggcccaactttgccatcattttggagaggattgaatactgcacccaggacccggatgtaatcaacaccgctttgccgatagaatatggtccacttgtggaagaggaagagaaagtgcctgtgaggcccaaggaccctgagggggttcctcctctcctggtctctcaacaggcaaaacgggaggaggagcgcagcccagctgccccaccacctctgcctaccacctcctctggcaaggctgcaaagaaacccacagctgcagaggtctctgttcgagtccctagagggccggccgtggaagggggacacgtgaatatggcattctctcagtccaaccctccttcggagttgcacagggtccacggatccagaaataagcccaccagcttgtggaacccaacgtacggctcctggtttacagagaaacccaccaaaaagaataatcctatagcaaagaaggagccacacgagaggggtaacctggggctggagggaagctgtactgtcccacctaacgttgcaactgggagacttccgggggcctcactgctcctagagccctcttcgctgactgccaatatgaaggaggtacctctgttcaggctacgtcacttcccttgtgggaatgtcaattacggctaccagcaacagggcttgcccttagaagccgctactgcccctggagctggtcattacgaggataccattctgaaaagcaagaatagcatgaaccagcctgggccctga

SEQ ID NO: 32978 - DNA, 2043 bp, Homo sapiens
  source 1..2043: mol_type = genomic DNA
atggaagattcgatggacatggacatgagccccctgaggccccagaactatcttttcggttgtgaactaaaggccgacaaagattatcactttaaggtggataatgatgaaaatgagcaccagttatctttaagaacggtcagtttaggggctggtgcaaaggatgagttgcacattgttgaagcagaggcaatgaattacgaaggcagtccaattaaagtaacactggcaactttgaaaatgtctgtacagccaacggtttcccttgggggctttgaaataacaccaccagtggtcttaaggttgaagtgtggttcagggccagtgcatattagtggacagcacttagtagtgtaccgccggaagcaccaggagctgcaagccatgcagatggagctgcagagccctgagtacaagctgagcaagctccgcacctcgaccatcatgaccgactacaaccccaactactgctttgctggcaagacctcctccatcagtgacctgaaggaggtgccgcggaaaaacatcaccctcattcggggtctgggccatggcgcctttggggaggtgtatgaaggccaggtgtccggaatgcccaacgacccaagccccctgcaagtggctgtgaagacgctgcctgaagtgtgctctgaacaggacgaactggatttcctcatggaagccctgatcatcagcaaattcaaccaccagaacattgttcgctgcattggggtgagcctgcaatccctgccccggttcatcctgctggagctcatggcggggggagacctcaagtccttcctccgagagacccgccctcgcccgagccagccctcctccctggccatgctggaccttctgcacgtggctcgggacattgcctgtggctgtcagtatttggaggaaaaccacttcatccaccgagacattgctgccagaaactgcctcttgacctgtccaggccctggaagagtggccaagattggagacttcgggatggcccgagacatctacagggcgagctactatagaaagggaggctgtgccatgctgccagttaagtggatgcccccagaggccttcatggaaggaatattcacttctaaaacagacacatggtcctttggagtgctgctatgggaaatcttttctcttggatatatgccataccccagcaaaagcaaccaggaagttctggagtttgtcaccagtggaggccggatggacccacccaagaactgccctgggcctgtataccggataatgactcagtgctggcaacatcagcctgaagacaggcccaactttgccatcattttggagaggattgaatactgcacccaggacccggatgtaatcaacaccgctttgccgatagaatatggtccacttgtggaagaggaagagaaagtgcctgtgaggcccaaggaccctgagggggttcctcctctcctggtctctcaacaggcaaaacgggaggaggagcgcagcccagctgccccaccacctctgcctaccacctcctctggcaaggctgcaaagaaacccacagctgcagaggtctctgttcgagtccctagagggccggccgtggaagggggacacgtgaatatggcattctctcagtccaaccctccttcggagttgcacaaggtccacggatccagaaacaagcccaccagcttgtggaacccaacgtacggctcctggtttacagagaaacccaccaaaaagaataatcctatagcaaagaaggagccacacgacaggggtaacctggggctggagggaagctgtactgtcccacctaacgttgcaactgggagacttccgggggcctcactgctcctagagccctcttcgctgactgccaatatgaaggaggtacctctgttcaggctacgtcacttcccttgtgggaatgtcaattacggctaccagcaacagggcttgcccttagaagccgctactgcccctggagctggtcattacgaggataccattctgaaaagcaagaatagcatgaaccagcctgggccctga

SEQ ID NO: 32979 - protein, 1129 aa, Homo sapiens [sequence omitted]

SEQ ID NO: 32980 - protein, 1059 aa, Homo sapiens [sequence omitted]

SEQ ID NO: 32981 - DNA, 3390 bp, Homo sapiens
  source 1..3390: mol_type = genomic DNA
atggacggtttcgccggcagtctcgatgatagtatttctgctgcaagtacttctgatgttcaagatcgcctgtcagctcttgagtcacgagttcagcaacaagaagatgaaatcactgtgctaaaggcggctttggctgatgttttgaggcgtcttgcaatctctgaagatcatgtggcctcagtgaaaaaatcagtctcaagtaaaggccaaccaagccctcgagcagttattcccatgtcctgtataaccaatggaagtggtgcaaacagaaaaccaagtcataccagtgctgtctcaattgcaggaaaagaaactctttcatctgctgctaaaagtggtacagaaaaaaagaaagaaaaaccacaaggacagagagaaaaaaaagaggaatctcattctaatgatcaaagtccacaaattcgagcatcaccttctccccagccctcttcacaacctctccaaatacacagacaaactccagaaagcaagaatgctactcccaccaaaagcataaaacgaccatcaccagctgaaaagtcacataattcttgggaaaattcagatgatagccgtaataaattgtcgaaaataccttcaacacccaaattaataccaaaagttaccaaaactgcagacaagcataaagatgtcatcatcaaccaagaaggagaatatattaaaatgtttatgcgcggtcggccaattaccatgttcattccttccgatgttgacaactatgatgacatcagaacggaactgcctcctgagaagctcaaactggagtgggcatatggttatcgaggaaaggactgtagagctaatgtttaccttcttccgaccggggaaatagtttatttcattgcatcagtagtagtactatttaattatgaggagagaactcagcgacactacctgggccatacagactgtgtgaaatgccttgctatacatcctgacaaaattaggattgcaactggacagatagctggcgtggataaagatggaaggcctctacaaccccacgtcagagtgtgggattctgttactctatccacactgcagattattggacttggcacttttgagcgtggagtaggatgcctggatttttcaaaagcagattcaggtgttcatttatgtgttattgatgactccaatgagcatatgcttactgtatgggactggcagaggaaagcaaaaggagcagaaataaagacaacaaatgaagttgttttggctgtggagtttcacccaacagatgcaaataccataattacatgcggtaaatctcatattttcttctggacctggagcggcaattcactaacaagaaaacagggaatttttgggaaatatgaaaagccaaaatttgtgcagtgtttagcattcttggggaatggagatgttcttactggagactcaggtggagtcatgcttatatggagcaaaactactgtagagcccacacctgggaaaggacctaaaggtgtatatcaaatcagcaaacaaatcaaagctcatgatggcagtgtgttcacactttgtcagatgagaaatgggatgttattaactggaggagggaaagacagaaaaataattctgtgggatcatgatctgaatcctgaaagagaaatagagtttagtgcttcaagggccaggctgccaggccatgttgcagctgaccacccacctgcagtgtaccgccggaagcaccaggagctgcaagccatgcagatggagctgcagagccctgagtacaagctgagcaagctccgcacctcgaccatcatgaccgactacaaccccaactactgctttgctggcaagacctcctccatcagtgacctgaaggaggtgccgcggaaaaacatcaccctcattcggggtctgggccatggcgcctttggggaggtgtatgaaggccaggtgtccggaatgcccaacgacccaagccccctgcaagtggctgtgaagacgctgcctgaagtgtgctctgaacaggacgaactggatttcctcatggaagccctgatcatcagcaaattcaaccaccagaacattgttcgctgcattggggtgagcctgcaatccctgccccggttcatcctgctggagctcatggcggggggagacctcaagtccttcctccgagagacccgccctcgcccgagccagccctcctccctggccatgctggaccttctgcacgtggctcgggacattgcctgtggctgtcagtatttggaggaaaaccacttcatccaccgagacattgctgccagaaactgcctcttgacctgtccaggccctggaagagtggccaagattggagacttcgggatggcccgagacatctacagggcgagctactatagaaagggaggctgtgccatgctgccagttaagtggatgcccccagaggccttcatggaaggaatattcacttctaaaacagacacatggtcctttggagtgctgctatgggaaatcttttctcttggatatatgccataccccagcaaaagcaaccaggaagttctggagtttgtcaccagtggaggccggatggacccacccaagaactgccctgggcctgtataccggataatgactcagtgctggcaacatcagcctgaagacaggcccaactttgccatcattttggagaggattgaatactgcacccaggacccggatgtaatcaacaccgctttgccgatagaatatggtccacttgtggaagaggaagagaaagtgcctgtgaggcccaaggaccctgagggggttcctcctctcctggtctctcaacaggcaaaacgggaggaggagcgcagcccagctgccccaccacctctgcctaccacctcctctggcaaggctgcaaagaaacccacagctgcagagatctctgttcgagtccctagagggccggccgtggaagggggacacgtgaatatggcattctctcagtccaaccctccttcggagttgcacaaggtccacggatccagaaacaagcccaccagcttgtggaacccaacgtacggctcctggtttacagagaaacccaccaaaaagaataatcctatagcaaagaaggagccacacgacaggggtaacctggggctggagggaagctgtactgtcccacctaacgttgcaactgggagacttccgggggcctcactgctcctagagccctcttcgctgactgccaatatgaaggaggtacctctgttcaggctacgtcacttcccttgtgggaatgtcaattacggctaccagcaacagggcttgcccttagaagccgctactgcccctggagctggtcattacgaggataccattctgaaaagcaagaatagcatgaaccagcctgggccctga

SEQ ID NO: 32982 - DNA, 3180 bp, Homo sapiens
  source 1..3180: mol_type = genomic DNA
atggacggtttcgccggcagtctcgatgatagtatttctgctgcaagtacttctgatgttcaagatcgcctgtcagctcttgagtcacgagttcagcaacaagaagatgaaatcactgtgctaaaggcggctttggctgatgttttgaggcgtcttgcaatctctgaagatcatgtggcctcagtgaaaaaatcagtctcaagtaaaggccaaccaagccctcgagcagttattcccatgtcctgtataaccaatggaagtggtgcaaacagaaaaccaagtcataccagtgctgtctcaattgcaggaaaagaaactctttcatctgctgctaaaagtggtacagaaaaaaagaaagaaaaaccacaaggacagagagaaaaaaaagaggaatctcattctaatgatcaaagtccacaaattcgagcatcaccttctccccagccctcttcacaacctctccaaatacacagacaaactccagaaagcaagaatgctactcccaccaaaagcataaaacgaccatcaccagctgaaaagtcacataattcttgggaaaattcagatgatagccgtaataaattgtcgaaaataccttcaacacccaaattaataccaaaagttaccaaaactgcagacaagcataaagatgtcatcatcaaccaagaaggagaatatattaaaatgtttatgcgcggtcggccaattaccatgttcattccttccgatgttgacaactatgatgacatcagaacggaactgcctcctgagaagctcaaactggagtgggcatatggttatcgaggaaaggactgtagagctaatgtttaccttcttccgaccggggaaatagtttatttcattgcatcagtagtagtactatttaattatgaggagagaactcagcgacactacctgggccatacagactgtgtgaaatgccttgctatacatcctgacaaaattaggattgcaactggacagatagctggcgtggataaagatggaaggcctctacaaccccacgtcagagtgtgggattctgttactctatccacactgcagattattggacttggcacttttgagcgtggagtaggatgcctggatttttcaaaagcagattcaggtgttcatttatgtgttattgatgactccaatgagcatatgcttactgtatgggactggcagaagaaagcaaaaggagcagaaataaagacaacaaatgaagttgttttggctgtggagtttcacccaacagatgcaaataccataattacatgcggtaaatctcatattttcttctggacctggagcggcaattcactaacaagaaaacagggaatttttgggaaatatgaaaagccaaaatttgtgcagtgtttagcattcttggggaatggagatgttcttactggagactcaggtggagtcatgcttatatggagcaaaactactgtagagcccacacctgggaaaggacctaaagtgtaccgccggaagcaccaggagctgcaagccatgcagatggagctgcagagccctgagtacaagctgagcaagctccgcacctcgaccatcatgaccgactacaaccccaactactgctttgctggcaagacctcctccatcagtgacctgaaggaggtgccgcggaaaaacatcaccctcattcggggtctgggccatggagcctttggggaggtgtatgaaggccaggtgtccggaatgcccaacgacccaagccccctgcaagtggctgtgaagacgctgcctgaagtgtgctctgaacaggacgaactggatttcctcatggaagccctgatcatcagcaaattcaaccaccagaacattgttcgctgcattggggtgagcctgcaatccctgccccggttcatcctgctggagctcatggcggggggagacctcaagtccttcctccgagagacccgccctcgcccgagccagccctcctccctggccatgctggaccttctgcacgtggctcgggacattgcctgtggctgtcagtatttggaggaaaaccacttcatccaccgagacattgctgccagaaactgcctcttgacctgtccaggccctggaagagtggccaagattggagacttcgggatggcccgagacatctacagggcgagctactatagaaagggaggctgtgccatgctgccagttaagtggatgcccccagaggccttcatggaaggaatattcacttctaaaacagacacatggtcctttggagtgctgctatgggaaatcttttctcttggatatatgccataccccagcaaaagcaaccaggaagttctggagtttgtcaccagtggaggccggatggacccacccaagaactgccctgggcctgtataccggataatgactcagtgctggcaacatcagcctgaagacaggcccaactttgccatcattttggagaggattgaatactgcacccaggacccggatgtaatcaacaccgctttgccgatagaatatggtccacttgtggaagaggaagagaaagtgcctgtgaggcccaaggaccctgagggggttcctcctctcctggtctctcaacaggcaaaacgggaggaggagcgcagcccagctgccccaccacctctgcctaccacctcctctggcaaggctgcaaagaaacccacagctgcagaggtctctgttcgagtccctagagggccggccgtggaagggggacacgtgaatatggcattctctcagtccaaccctccttcggagttgcacagggtccacggatccagaaacaagcccaccagcttgtggaacccaacgtacggctcctggtttacagagaaacccaccaaaaagaataatcctatagcaaagaaggagccacacgagaggggtaacctggggctggagggaagctgtactgtcccacctaacgttgcaactgggagacttccgggggcctcactgctcctagagccctcttcgctgactgccaatatgaaggaggtacctctgttcaggctacgtcacttcccttgtgggaatgtcaattacggctaccagcaacagggcttgcccttagaagccgctactgcccctggagctggtcattacgaggataccattctgaaaagcaagaatagcatgaaccagcctgggccctga

SEQ ID NO: 32983 - protein, 275 aa, Homo sapiens [sequence omitted]

SEQ ID NO: 32984 - protein, 275 aa, Homo sapiens
GSHSMRYFYTSVSRPGRGEPRFISVGYVDDTQFVRFDSDAASPREEPRAPWIEQEGPEYWDRNTQIYKAQAQTDRESLRNLRGYYNQSEAGSHTLQSMYGCDVGPDGRLLRGHDQYAYDGKDYIALNEDLRSWTAADTAAQITQRKWEAAREAEQRRAYLEGECVEWLRRYLENGKDKLERADPPKTHVTHHPISDHEATLRCWALGFYPAEITLTWQRDGEDQTQDTELVETRPAGDRTFQKWAAVVVPSGEEQRYTCHVQHEGLPKPLTLRWE

SEQ ID NO: 32985 - protein, 9 aa, synthetic construct
PGPGRVAKI

SEQ ID NO: 32986 - DNA, 20 bp, synthetic construct
  source 1..20: mol_type = other DNA
agagatctcccacacccaaa

SEQ ID NO: 32987 - protein, 9 aa, synthetic construct
RPRPSQPSS

SEQ ID NO: 32988 - DNA, 20 bp, synthetic construct
  source 1..20: mol_type = other DNA
agagtctctcagctggtaca

SEQ ID NO: 32989 - protein, 12 aa, synthetic construct
CASSQDWDEQYF

SEQ ID NO: 32990 - DNA, 36 bp, synthetic construct
  source 1..36: mol_type = other DNA
tgtgccagcagccaggactgggatgaacagtacttc

SEQ ID NO: 32991 - protein, 13 aa, synthetic construct
CAASEHGNNRIFF

SEQ ID NO: 32992 - DNA, 39 bp, synthetic construct
  source 1..39: mol_type = other DNA
tgtgcagctagtgagcatgggaataacagaatcttcttt

SEQ ID NO: 32993 - protein, 14 aa, synthetic construct
CASSLGDSPDTQYF

SEQ ID NO: 32994 - DNA, 42 bp, synthetic construct
  source 1..42: mol_type = other DNA
tgtgctagcagtttaggggacagccctgacacccagtacttt

SEQ ID NO: 32995 - protein, 17 aa, synthetic construct
CAASEHGASSSFSKLVF

SEQ ID NO: 32996 - DNA, 51 bp, synthetic construct
  source 1..51: mol_type = other DNA
tgtgcagctagtgagcatggggcatcctcctccttcagcaagctggtgttt

SEQ ID NO: 32997 - protein, 13 aa, synthetic construct
CASSEGSSYEQYF

SEQ ID NO: 32998 - DNA, 39 bp, synthetic construct
  source 1..39: mol_type = other DNA
tgtgccagcagtgaggggagctcctatgaacagtacttc

SEQ ID NO: 32999 - protein, 15 aa, synthetic construct
CAASEHGNSGTYQRF

SEQ ID NO: 33000 - DNA, 45 bp, synthetic construct
  source 1..45: mol_type = other DNA
tgtgcagctagtgagcatggaaattctgggacttaccagaggttt

SEQ ID NO: 33001 - protein, 14 aa, synthetic construct
CASSFSDWGDEQYF

SEQ ID NO: 33002 - DNA, 42 bp, synthetic construct
  source 1..42: mol_type = other DNA
tgtgccagcagtttctcggactggggggatgaacagtacttc

SEQ ID NO: 33003 - protein, 13 aa, synthetic construct
CAASEHGNNRLTL

SEQ ID NO: 33004 - DNA, 39 bp, synthetic construct
  source 1..39: mol_type = other DNA
tgtgcagctagtgagcacggcaacaacagacttactttg

SEQ ID NO: 33005 - protein, 14 aa, synthetic construct
CASSISDWGDEQYF

SEQ ID NO: 33006 - DNA, 42 bp, synthetic construct
  source 1..42: mol_type = other DNA
tgtgccagcagtatatcggactggggggatgaacagtacttc

SEQ ID NO: 33007 - DNA, 39 bp, synthetic construct
  source 1..39: mol_type = other DNA
tgtgcagctagtgagcacggcaataacagaatcttcttt

SEQ ID NO: 33008 - protein, 1620 aa, Homo sapiens; identical to SEQ ID NO: 32968
